(19) United States
(12) Patent Application Publication
(10) Pub. No.: US 2026/0078376 A1
(43) Pub. Date: Mar. 19, 2026

(54) OLIGONUCLEOTIDES FOR THE TREATMENT OF BREAST CANCER

(71) Applicant: CORE BIOTHERAPEUTICS, INC., Ladera Ranch, CA (US)

(72) Inventors: Michael KLUKINOV, Pittsburg, CA (US); David C. YEOMANS, Sunnyvale, CA (US); Julien MAMET, Hayward, CA (US)

(21) Appl. No.: 19/106,594

(22) PCT Filed: Aug. 25, 2023
(86) PCT No.: PCT/US2023/072946

§ 371 Date: Feb. 25, 2025

Related U.S. Application Data
(60) Provisional application No. 63/373,658, filed on Aug. 26, 2022.
(60) Provisional application No. 63/477,753, filed on Dec. 29, 2022.

(51) Int. Cl. C12N 15/113; A61K 31/712; A61K 31/713; A61P 35/00

(52) U.S. Cl. CPC C12N 15/1135; A61K 31/712; A61K 31/713; A61P 35/00; C12N 15/1136; C12N 2310/13; C12N 2310/322

(57) ABSTRACT

Provided are therapeutic agents such as double-stranded nucleic acids, termed oligonucleotide decoys, pharmaceutical compositions comprising the same, and related methods of modulating breast cancer signaling, for instance, to treat breast cancer.

### CROSS-REFERENCE TO RELATED APPLICATIONS

[0001] The present application claims priority to U.S. Provisional Application No. 63/373,658, filed Aug. 26, 2022 and U.S. Provisional Application No. 63/477,753, filed Dec. 29, 2022, the entire contents of each of which are hereby incorporated by reference in their entirety for all purposes.

### SEQUENCE LISTING

[0002] The contents of the electronic sequence listing (NEBI_001_01WO_SeqList_ST26.xml; Size: 5,967,445 bytes; and Date of Creation: Aug. 25, 2023) are herein incorporated by reference in its entirety.

### FIELD OF THE INVENTION

[0003] The present invention relates to therapeutic agents such as double-stranded nucleic acids, termed oligonucleotide decoys, pharmaceutical compositions comprising the same, and related methods of treating breast cancer.

### BACKGROUND

[0004] Cancer is a large group of diseases that can start in almost any organ or tissue of the body when abnormal cells grow uncontrollably, go beyond their usual boundaries to invade adjoining parts of the body and/or spread to other organs. The latter process is called metastasizing and is a major cause of death from cancer. A neoplasm and malignant tumor are other common names for cancer.

[0005] Cancer is the second leading cause of death globally, accounting for an estimated 9.6 million deaths, or one in six deaths, in 2018.

[0006] Breast cancer, is amongst the most common cancer type among women but can also affect men. There are many types of breast cancer, and many different ways to describe them. The type of breast cancer is determined by the specific cells in the breast that are affected. Most breast cancers are carcinomas, which are tumors that start in the epithelial cells that line organs and tissues throughout the body. When carcinomas form in the breast, they are usually a more specific type called adenocarcinoma, which starts in cells in the ducts (the milk ducts) or the lobules (milk-producing glands).

[0007] The type of breast cancer can also refer to whether the cancer has spread or not. In situ breast cancer (ductal carcinoma in situ, or DCIS) is a cancer that starts in a milk duct and has not grown into the rest of the breast tissue. The term invasive or infiltrating breast cancer is used to describe any type of breast cancer that has spread or invaded into the surrounding breast tissue. Some invasive breast cancers have special features or develop in different ways that affect their treatment and outlook. These cancers are less common but can be more serious than other types of breast cancer. They include: Triple-negative breast cancer (TNBC) accounts for about 10-15% of all breast cancers. The term triple-negative breast cancer refers to the fact that the cancer cells don't have estrogen or progesterone receptors and also don't make too much of the protein called HER2.

[0008] Inflammatory breast cancer (IBC) is rare and accounts for 1-5% of all breast cancers. Although it is often a type of invasive ductal carcinoma, it differs from other types of breast cancer in its symptoms, outlook, and treatment. IBC has symptoms of inflammation like swelling and redness, but infection or injury do not cause IBC or the symptoms IBC symptoms are caused by cancer cells blocking lymph vessels in the skin causing the breast to look “inflamed.”

[0009] Triple-negative breast cancer differs from other types of invasive breast cancer in that they grow and spread faster, have limited treatment options, and a worse prognosis.

[0010] Other types can include Paget disease of the breast, Angiosarcoma, and phyllode tumors.

[0011] Breast tumors can also be classified by the type of receptor or market that they express or not, including but not limited to estrogen receptor (ER+), progesterone receptor (PR+), Her2 receptor (HER2+), and androgen receptors (AR+).

[0012] Current treatments include surgery, chemotherapy, radiation therapy, targeted therapy, immunotherapy, stem cell or bone marrow transplant, and hormone therapy. While treatments can be efficacious in some tumors and can improve the disease state and/or patient survival, they are ineffective in a range of tumor types. The toxicity of those treatments is also significant, debilitating, and can in cases even prevent the use of the treatments.

[0013] Thus, there is a need in the art for improved breast cancer treatment methods.

### SUMMARY OF THE INVENTION

[0014] The present disclosure provides double-stranded nucleic acids termed oligonucleotide decoys and pharmaceutical compositions comprising the same, and related methods of modulating and treating breast cancer.

[0015] In embodiments, the present disclosure provides an oligonucleotide decoy, comprising at least two transcription factor binding sites, wherein each transcription factor binding site binds to a transcription factor selected from the group consisting of: BCL11A, CxxC domain-containing proteins (e.g., CXXC5), E2F (e.g., E2F5, E2F3), FOX (e.g., FOXC1, FOXM1), GTF2IRD1, HMGA1, HOXB5, LYL1, MAF (e.g., c-MAF, MAF-k), MAX, MYC, NFIL3, TCF (e.g., TCF3, TCF4, TCF7L1), TGIF2, XBP1, YBX1, YY1, ZEB2 and closely related factors. In embodiments, the oligonucleotide decoy is about 10 to about 100 base pairs in length. In embodiments, the oligonucleotide decoy binds 2 to 40 transcription factors. In embodiments, the oligonucleotide decoy comprises a first transcription factor binding site and a second transcription factor binding site, and wherein the first and the second transcription binding sites overlap. In embodiments, the oligonucleotide decoy further comprises a third transcription factor binding site, wherein the first, second, and third transcription factor binding sites overlap. In embodiments, the oligonucleotide decoy comprises 3-40 transcription factor binding sites that overlap. In embodiments, the oligonucleotide decoy comprises transcription factor binding sites that do not overlap. In embodiments, the oligonucleotide decoy is 12, 17, 18, 29, 41, 44, or 57-nucleotide long.

[0016] In embodiments, the present disclosure provides a nucleotide sequence that is at least 80%, at least 85%, at least 90%, at least 95%, or 100% identical to a sequence selected from the group consisting of SEQ ID NO: 1 to SEQ ID NO: 48. In embodiments, the oligonucleotide decoy binds to one or more transcription factors selected from the group consisting of: TCF7L1 and GTF2IRD1.

[0017] In embodiments, the present disclosure provides a nucleotide sequence that is at least 80%, at least 85%, at least 90%, at least 95%, or 100% identical to a sequence selected from the group consisting of SEQ ID NO: 49 to SEQ ID NO: 64. In embodiments, the oligonucleotide decoy binds to one or more transcription factors selected from the group consisting of: FOXC1, FOXM1, GTF2IRD1, and TCF7L1.

[0018] In embodiments, the present disclosure provides a nucleotide sequence that is at least 80%, at least 85%, at least 90%, at least 95%, or 100% identical to a sequence selected from the group consisting of SEQ ID NO: 3761 to SEQ ID NO: 3836. In embodiments, the oligonucleotide decoy binds to one or more transcription factors selected from the group consisting of: BCL11A, HMGA1, HOXB5, and MAF.

[0019] In embodiments, the present disclosure provides a nucleotide sequence that is at least 80%, at least 85%, at least 90%, at least 95%, or 100% identical to a sequence selected from the group consisting of SEQ ID NO: 3837 to SEQ ID NO: 3868. In embodiments, the oligonucleotide decoy binds to one or more transcription factors selected from the group consisting of: BCL11A, HMGA1, HOXB5, and MAF.

[0020] In embodiments, the present disclosure provides a nucleotide sequence that is at least 80%, at least 85%, at least 90%, at least 95%, or 100% identical to a sequence selected from the group consisting of SEQ ID NO: 65 to SEQ ID NO: 176, and SEQ ID NO: 4593. In embodiments, the oligonucleotide decoy binds to one or more transcription factors selected from the group consisting of: E2F3, E2F5, FOXC1, FOXM1, GTF2IRD1, LYL1, TCF4, TCF7L1, TGIF2, and ZEB2.

[0021] In embodiments, the present disclosure provides a nucleotide sequence that is at least 80%, at least 85%, at least 90%, at least 95%, or 100% identical to a sequence selected from the group consisting of SEQ ID NO: 177 to SEQ ID NO: 3760. In embodiments, the oligonucleotide decoy binds to one or more transcription factors selected from the group consisting of: CXXC5, FOXC1. FOXM1, MAX, NFIL3, TCF4, XBP1, YBX1, YY1, and ZEB2.

[0022] In embodiments, the present disclosure provides a nucleotide sequence that is at least 80%, at least 85%, at least 90%, at least 95%, or 100% identical to a sequence selected from the group consisting of SEQ ID NO: 3869 to SEQ ID NO: 4540. In embodiments, the oligonucleotide decoy binds to one or more transcription factors selected from the group consisting of: BCL11A, E2F3, E2F5, FOXC1, FOXM1, GTF2IRD1, HMGA1, HOXB5, LYL1, MAF, TCF4, TCF7L1, TGIF2, and ZEB2.

[0023] In embodiments, the oligonucleotide decoy binds to one or more transcription factors selected from the group consisting of: BCL11A, CxxC domain-containing proteins (e.g., CXXC5), E2F (e.g., E2F5, E2F3), FOX (e.g., FOXC1, FOXM1), GTF2IRD1, HMGA1, HOXB5, LYL1, MAF (e.g., c-MAF, MAF-k), MAX, MYC, NFIL3, TCF (e.g., TCF3, TCF4, TCF7L1), TGIF2, XBP1, YBX1, YY1, ZEB2 and closely related factors.

[0024] In embodiments, the present disclosure provides a nucleotide sequence that is at least 80%, at least 85%, at least 90%, at least 95%, or 100% identical to a sequence selected from the group consisting of SEQ ID NO: 88, SEQ ID NO: 2225, SEQ ID NO: 4593, SEQ ID NO: 4594, SEQ ID NO: 4595, SEQ ID NO: 4596, SEQ ID NO:4547, and SEQ ID NO: 4598.

[0025] In embodiments, the oligonucleotide decoy is a double-stranded nucleic acid.

[0026] In embodiments, the present disclosure provides a pharmaceutical composition, comprising an oligonucleotide decoy or population of oligonucleotide decoy as described herein, and a pharmaceutically acceptable carrier.

[0027] In embodiments, the present disclosure provides a kit, comprising an oligonucleotide decoy or population of oligonucleotide decoys as described herein, and optionally an instruction for using said oligonucleotide decoy.

[0028] In embodiments, the present disclosure provides a method for modulating transcription of a gene present in a cell involved in breast cancer signaling, comprising administering to the cell an effective amount of an oligonucleotide decoy as described herein. In embodiments, the present disclosure provides a method for modulating breast cancer signaling in a cell, comprising administering to the cell an effective amount of an oligonucleotide decoy as described herein. In embodiments, the present disclosure provides a method for treating breast cancer in a subject in need thereof, comprising administering to the subject a therapeutically effective amount of an oligonucleotide decoy as described herein. In embodiments, the breast cancer is a triple negative breast cancer. In embodiments, the breast cancer is an ER+ or PR+ breast cancer. In embodiments, the breast cancer is an HER2+ breast cancer.

[0029] In embodiments, the present disclosure provides a method for modulating breast cancer signaling in a cell, comprising administering to the cell a therapeutically effective amount of a therapeutic agent, wherein the therapeutic agent inhibits binding of a transcription factor to its transcription factor binding site, wherein the transcription factor is selected from the group consisting of BCL11A, CxxC domain-containing proteins (e.g., CXXC5), E2F (e.g., E2F5, E2F3), FOX (e.g. FOXC1, FOXM1), GTF2IRD1, HMGA1, HOXB5, LYL1, MAF (e.g. c-MAF, MAF-k), MAX, MYC, NFIL3, TCF (e.g., TCF3, TCF4, TCF7L1), TGIF2, XBP1, YBX1, YY1, ZEB2 and closely related factors.

[0030] In embodiments, the present disclosure provides a method for treating breast cancer in a subject in need thereof, comprising administering to the subject a therapeutically effective amount of a therapeutic agent, wherein the therapeutic agent inhibits binding of a transcription factor to its transcription binding site, wherein the transcription factor is selected from the group consisting of BCL11A, CxxC domain-containing proteins (e.g., CXXC5), E2F (e.g., E2F5, E2F3), FOX (e.g. FOXC1, FOXM1), GTF2IRD1, HMGA1, HOXB5, LYL1, MAF (e.g. c-MAF, MAF-k), MAX, MYC, NFIL3, TCF (e.g., TCF3, TCF4, TCF7L1), TGIF2, XBP1, YBX1, YY1, ZEB2 and closely related factors.

[0031] In embodiments, the present disclosure provides therapeutic agents, such as oligonucleotides, which inhibit the binding of at least one of the following transcription factors: BCL11A, CxxC domain-containing proteins (e.g., CXXC5), E2F (e.g., E2F5, E2F3), FOX (e.g. FOXC1, FOXM1), GTF2IRD1, HMGA1, HOXB5, LYL1, MAF (e.g. c-MAF, MAF-k), MAX, MYC, NFIL3, TCF (e.g., TCF3, TCF4, TCF7L1), TGIF2, XBP1, YBX1, YY1, ZEB2 and closely related factors to its (their) endogenous transcription factor binding site(s), pharmaceutical compositions comprising such agents, and related methods of modulating signaling, for example, to treat breast tumor and limit its progression, growth, migration, invasiveness, and/or metastasis and/or treat secondary metastatic tumors and/or recurrence, from breast cancer stem cells, in a subject in need thereof. In some embodiments, the therapeutic agents are double-stranded oligonucleotides (e.g., oligonucleotide decoys), which comprise one or more transcription factor binding sites that bind to at least one of the following transcription factors: BCL11A, CxxC domain-containing proteins (e.g., CXXC5), E2F (e.g., E2F5, E2F3), FOX (e.g. FOXC1, FOXM1), GTF2IRD1, HMGA1, HOXB5, LYL1, MAF (e.g. c-MAF, MAF-k), MAX, MYC, NFIL3, TCF (e.g., TCF3, TCF4, TCF7L1), TGIF2, XBP1, YBX1, YY1, ZEB2 and closely related factors to its endogenous transcription factor binding site(s).

[0032] Embodiments of the present invention therefore include oligonucleotide decoys comprising one or more transcription factor binding sites, wherein the one or more transcription factor binding sites bind to a transcription factor selected from the group consisting of: BCL11A, CxxC domain-containing proteins (e.g., CXXC5), E2F (e.g., E2F5, E2F3), FOX (e.g. FOXC1, FOXM1), GTF2IRD1, HMGA1, HOXB5, LYL1, MAF (e.g. c-MAF, MAF-k), MAX, MYC, NFIL3, TCF (e.g., TCF3, TCF4, TCF7L1), TGIF2, XBP1, YBX1, YY1, ZEB2 and closely related factors to its endogenous transcription factor binding site(s).

[0033] In some embodiments, the one or more transcription factor binding sites bind to one or more transcription factors (1, 2, 3, 4, 5, etc.), selected from one or more of BCL11A, CxxC domain-containing proteins (e.g., CXXC5), E2F (e.g., E2F5, E2F3), FOX (e.g. FOXC1, FOXM1), GTF2IRD1, HMGA1, HOXB5, LYL1, MAF (e.g. c-MAF, MAF-k), MAX, MYC, NFIL3, TCF (e.g., TCF3, TCF4, TCF7L1), TGIF2, XBP1, YBX1, YY1, ZEB2 and closely related factors to its endogenous transcription factor binding site(s).

[0034] In particular embodiments, the oligonucleotide decoys comprise a combination of at least two transcription factor binding sites, wherein each transcription factor binding site binds to a transcription factor selected from the group consisting of BCL11A, CxxC domain-containing proteins (e.g., CXXC5), E2F (e.g., E2F5, E2F3), FOX (e.g. FOXC1, FOXM1), GTF2IRD1, HMGA1, HOXB5, LYL1, MAF (e.g. c-MAF, MAF-k), MAX, MYC, NFIL3, TCF (e.g., TCF3, TCF4, TCF7L1), TGIF2, XBP1, YBX1, YY1, ZEB2 and closely related factors to its endogenous transcription factor binding site(s). In particular embodiments, each transcription factor binding site binds to a different transcription factor consisting of BCL11A, CxxC domain-containing proteins (e.g., CXXC5), E2F (e.g., E2F5, E2F3), FOX (e.g., FOXC1, FOXM1), GTF2IRD1, HMGA1, HOXB5, LYL1, MAF (e.g., c-MAF, MAF-k), MAX, MYC, NFIL3, TCF (e.g., TCF3, TCF4, TCF7L1), TGIF2, XBP1, YBX1, YY1, ZEB2 and closely related factors to its endogenous transcription factor binding site(s).

[0035] In some embodiments, the oligonucleotide decoy is about 10 to about 200 base pairs in length.

[0036] In particular embodiments, the oligonucleotide decoy comprises transcription factor binding sites for different transcription factors that overlap. In particular embodiments, the oligonucleotide decoy comprises a transcription factor binding sites that are in opposite direction.

[0037] In certain embodiments, the oligonucleotide decoy has a first transcription factor binding site, and up to 1 other transcription factor binding sites. In specific embodiments, binding site binds to TCF7L1 and/or GTF2IRD1 and/or transcription factors related to those.

[0038] In certain embodiments, the oligonucleotide decoy has a first transcription factor binding site, and up to 3 other transcription factor binding sites. In specific embodiments, binding site binds to FOXC1 and/or FOXM1 and/or TCF7L1 and/or GTF2IRD1 and/or transcription factors related to those.

[0039] In certain embodiments, the oligonucleotide decoy has a first transcription factor binding site, an up to 1, 2, 3, 4, 5, 6, 7 or 8 other transcription factor binding sites. In specific embodiments, binding site binds to YBX1 and/or YY1, and/or ZEB2 and/or FOXM1 and/or FOXC1 and/or MAX and/or XBP1 and/or CXXC5 and/or NFIL3 and/or transcription factors related to those.

[0040] In certain embodiments, the oligonucleotide decoy has a first transcription factor binding site, an up to 1, 2, 3, 4, 5, 6, 7, 8, 9 or 10 other transcription factor binding sites. In specific embodiments, binding site binds to ZEB2 and/or FOXM1, and/or TCF4 and/or MAF and/or TCF7L1 and/or TGIF2 and/or LYL1 and/or GTF2IRD1 and/or FOXC1 and/or E2F3 and/or E2F5 and/or transcription factors related to those.

[0041] In certain embodiments, the oligonucleotide decoy has a first transcription factor binding site, an up to an up to 1, 2, 3, 4, 5, 6, 7, 8, 9 or 10 other transcription factor binding sites. In specific embodiments, binding site binds to YBX1 and/or YY1, and/or ZEB2 and/or FOXM1 and/or FOXC1 and/or TCF7L1 and/or TGIF2 and/or LYL1 and/or GTF2IRD1, and/or E2F3, and/or E2/F5 and/or transcription factors related to those.

[0042] In certain embodiments, the oligonucleotide decoy has a first transcription factor binding site, an up to 1, 2, 3, 4, 5, 6, 7, 8, 9, 10, 11, 12 or 13 other transcription factor binding sites. In specific embodiments, binding site binds to ZEB2 and/or FOXM1, and/or TCF4 and/or MAF and/or TCF7L1 and/or TGIF2 and/or LYL1 and/or GTF2IRD1 and/or FOXC1 and/or E2F3 and/or E2F5 and/or BCL11A, and/or HOXB5, and/or HMGA1 and/or transcription factors related to those.

[0043] In certain embodiments, the oligonucleotide decoy has a first transcription factor binding site, an up to 1, 2, 3, 4, 5, 6, 7, 8, 9, 10, 11, 12, 13, 14, 15, 16, 17, 18 or 19 other transcription factor binding sites. In specific embodiments, binding site binds to ZEB2 and/or FOXM1, and/or TCF4 and/or MAF and/or TCF7L1 and/or TGIF2 and/or LYL1 and/or GTF2IRD1 and/or FOXC1 and/or E2F3 and/or E2F5 and/or BCL11A, and/or HOXB5, and/or HMGA1 and/or YBX1, and/or YY1 and/or CXXC5, and/or NFIL3, and/or MAX, and/or XBP1 and/or transcription factors related to those.

[0044] In certain embodiments, the oligonucleotide decoy has a first transcription factor binding site, more than 20 other transcription factor binding sites In specific embodiments, binding site binds to any of combination of t transcription factors from the following list: BCL11A, CxxC domain-containing proteins (e.g., CXXC5), E2F (e.g., E2F5, E2F3), FOX (e.g. FOXC1, FOXM1), GTF2IRD1, HMGA1, HOXB5, LYL1, MAF (e.g. c-MAF, MAF-k), MAX, MYC, NFIL3, TCF (e.g., TCF3, TCF4, TCF7L1), TGIF2, XBP1, YBX1, YY1, ZEB2 and closely related factors.

[0045] Certain embodiments relate to one or more population(s) of the oligonucleotide decoys described herein, wherein the population of oligonucleotide decoys provide transcription factor binding sites to address combinations of multiple transcription factors that present the potential to treat multiple types of breast cancers (e.g., slow or stop tumor growth, reduce tumor size, inhibit tumor aggressiveness and tissue invasion and/or prevent metastasis).

[0046] Certain embodiments relate to one or more population(s) of the oligonucleotide decoys described herein, wherein the population of oligonucleotide decoys provide transcription factor binding sites to address combinations of multiple transcription factors that present the potential to block normal or stem cell transformation into cancer cells, cancer cell proliferation, favor cancer cell death (e.g. apoptosis), cancer cell migration, cancer cell invasion, epithelial-mesenchymal transition and/or metastasis.

[0047] In some embodiments, the therapeutic agent provides unique binding sites compositions and position that allow for binding more than one and up to 40 or more transcription factors at a time.

[0048] In some embodiments, the oligonucleotide decoy comprises a sequence represented Table A.

[0049] Also included are pharmaceutical compositions comprising an oligonucleotide decoy or population of decoys described herein and a pharmaceutically acceptable carrier. In certain embodiments, the oligonucleotide decoys are provided as salts, hydrates, solvates, or N-oxides derivatives.

[0050] Some embodiments include one or more kits comprising an oligonucleotide decoy or population of decoys described herein, optionally an instruction for using the oligonucleotide decoy(s).

[0051] Also included are methods for modulating the transcription of a gene present in a cell involved in cancer signaling comprising administering to the cell an effective amount of an oligonucleotide decoy or pharmaceutical composition described herein.

[0052] Also included are methods for modulating cancer signaling in a cell comprising administering to the cell an effective amount of an oligonucleotide decoy or pharmaceutical composition described herein.

[0053] Certain embodiments include methods for treating cancer and preventing relapse and/or metastasis in a subject comprising administering to the subject a therapeutically effective amount of an oligonucleotide decoy or pharmaceutical composition described herein. In some embodiments, the tumor is a triple negative breast tumor (i.e., negative for estrogen receptor, progesterone receptor and HER2 receptor). In particular embodiments, the tumor is a HER2 positive breast tumor or an estrogen receptor positive breast tumor, or a progesterone receptor breast tumor. In particular embodiments, the tumor is any form of breast tumor.

[0054] Also included are methods for modulating cancer signaling in a cell comprising administering to the cell a therapeutically effective amount of a therapeutic agent, wherein the therapeutic agent inhibits binding of one or more transcription factor to corresponding endogenous transcription factor binding sites, wherein the transcription factor(s) is (are) selected from the group consisting of BCL11A, CxxC domain-containing proteins (e.g., CXXC5), E2F (e.g., E2F5, E2F3), FOX (e.g. FOXC1, FOXM1), GTF2IRD1, HMGA1, HOXB5, LYL1, MAF (e.g. c-MAF, MAF-k), MAX, MYC, NFIL3, TCF (e.g., TCF3, TCF4, TCF7L1), TGIF2, XBP1, YBX1, YY1, ZEB2 and closely related factors.

### BRIEF DESCRIPTION OF THE DRAWINGS

[0055] FIG. 1A shows the average fold-change in cell confluency following treatment of oligonucleotide SEQ ID NO: 4593 in MDA-MB-231 triple negative breast cancer cells, as described in Example 1. Data normalized on the cell confluence for each tested condition measured at T=0, n=3. Treatment conditions: untreated cells, 0.12 uL RNAimax control, 0.5 uL RNAimax control, 50 nM of SEQ ID NO: 4593, and 100 nM of SEQ ID NO: 4593. *p<0.05, Student T test compared to untreated and corresponding RNAimax controls (0.12 uL for 50 nM, 0.5 uL for 100 nM). Data shown as mean±SEM.

[0056] FIG. 1B shows the average fold-change in cell confluency following treatment of oligonucleotide SEQ ID NO: 4593 in KPL4 her2+ breast cancer cells, as described in Example 1. Data normalized on the cell confluence for each tested condition measured at T=0, n=3. Treatment conditions: untreated cells, 0.12 uL RNAimax control, 0.5 uL, RNAimax control, 50 nM of SEQ ID NO: 4593, 100 nM of SEQ ID NO: 4593. *p<0.05, Student T test compared to untreated and corresponding RNAimax controls (0.12 uL for 50 nM, 0.5 uL for 100 nM). Data shown as mean±SEM.

[0057] FIG. 1C shows the average fold-change in cell confluency following treatment of oligonucleotide SEQ ID NO: 2225 in MDA-MB-231 triple negative breast cancer cells, as described in Example 1. Data normalized on the cell confluence for each tested condition measured at T=0, n=3. Treatment conditions: untreated cells, 0.12 uL RNAimax control, 0.5 uL RNAimax control, 50 nM of SEQ ID NO: 2225, and 100 nM of SEQ ID NO: 2225. *p<0.05, Student T test compared to untreated and corresponding RNAimax controls (0.12 uL for 50 nM, 0.5 uL for 100 nM). Data shown as mean±SEM.

[0058] FIG. 1D shows the average fold-change in cell confluency following treatment of oligonucleotide SEQ ID NO: 2225 in KPL4 her2+ breast cancer cells, as described in Example 1. Data normalized on the cell confluence for each tested condition measured at T=0, n=3. Treatment conditions: untreated cells, 0.12 uL RNAimax control, 0.5 uL RNAimax control, 50 nM of SEQ ID NO: 2225, 100 nM of SEQ ID NO: 2225. *p<0.05, Student T test compared to untreated and corresponding RNAimax controls (0.12 uL for 50 nM, 0.5 uL for 100 nM). Data shown as mean±SEM.

[0059] FIG. 2A shows the change in apoptotic cell count following treatment of oligonucleotide SEQ ID NO: 4593 in MDA-MB-231 breast cancer cells, as described in Example 2. Data normalized on cell confluence for each tested condition, n=3. *p<0.05, Student T test compared to untreated and corresponding RNAimax controls (0.12 uL for 50 nM, 0.5 uL for 100 nM), data shown as mean±SEM. Images of apoptotic cells labeled in red after treating with 100 nM of SEQ ID NO: 4593 at 24, 48, 72, 96 and 120 h after transfection are shown above the graph Treatment conditions: untreated cells, 0.12 uL RNAimax control, 0.5 uL. RNAimax control, 50 nM of SEQ ID NO: 4593, and 100 nM of SEQ ID NO: 4593.

[0060] FIG. 2B shows the change in apoptotic cell count following treatment of oligonucleotide SEQ ID NO: 2225 in MDA-MB-231 breast cancer cells, as described in Example 2. Data normalized on cell confluence for each tested condition, n=3. *p<0.05, Student T test compared to untreated and corresponding RNAimax controls (0.12 uL for 50 nM, 0.5 uL for 100 nM), data shown as mean±SEM.

[0061] FIG. 3A shows a representative fluorescent image of green fluorophore (ALEXA488) coupled oligonucleotide SEQ ID NO: 4593 localized in the nuclei of the MDA-MB-231 cells following transfection (detection indicated by white arrows), as described in Example 3.

[0062] FIG. 3B shows the average fold-change in cell confluency following treatment of the oligonucleotide (SEQ ID NO: 4593) in MDA-MB-231 cells, as described in Example 3. Treatment conditions: untreated cells, 0.12 uL RNAimax control (for 1, 25 and 50 nM of SEQ ID NO: 4593), 0.5 uL RNAimax control (for 100 and 200 nM of SEQ ID NO: 4593), 1 nM of SEQ ID NO: 4593, 10 nM of SEQ ID NO: 4593, 25 nM of SEQ ID NO: 4593, 50 nM of SEQ ID NO: 4593, 100 nM of SEQ ID NO: 4593, and 200 nM of SEQ ID NO: 4593.

[0063] FIG. 3C shows a dose response curve of the oligonucleotide (SEQ ID NO: 4593) in MDA-MB-231 cells. Efficacy was measured as a reduction in cell proliferation (area-under-the-curve of confluence curves) over 4 days starting 24h following transfection compared to corresponding RNAimax controls, as described in Example 3. Two Way ANOVA, p<0.001; n=3 per condition, exponential fit curve, R²>0.8.

[0064] FIG. 4A shows the average fold-change in cell confluency following treatment of the oligonucleotide (SEQ ID NOs: 4594, 4595, and 4596) alone or combined in MDA-MB-231 cells, as described in Example 4. The confluence over time of untreated cells and the effect of RNAImax alone (0.5 uL) are shown as controls. The effect of each sequence is statistically different from the effect of the combined sequences, Student T test, p<0.05. Data shown as mean±SEM.

[0065] FIG. 4B shows a dose response curve of the oligonucleotide (SEQ ID NOs: 4594, 4595, and 4596), as described in Example 4. MDA-MB-231 cells were transfected with 200 nM of SEQ ID NOs 4594, 4595, and 4596 or 50 nM of each of the sequences combined.

[0066] FIG. 5A shows the average fold-change in cell confluency over time following treatment of the oligonucleotide (SEQ ID NO: 88, 4597 and 4598) in MDA-MB-231 breast cancer cells, as described in Example 5. Treatment conditions: 100 nM of SEQ ID NOs 88, 4597, and 4598. Data normalized on cell confluence at T=0 for each tested condition and shown as mean±SEM The effects of SEQ ID NO: 4597, SEQ ID NO: 4598 and SEQ ID NO: 88 are statistically different from each other, Student T test, *p<0.05.

[0067] FIG. 5B shows the average fold-change in cell confluency over time following treatment of the oligonucleotide (SEQ ID NO: 88, 4597 and 4598) in KPL4 breast cancer cells, as described in Example 5. Treatment conditions: 100 nM of SEQ ID NOs 88, 4597, and 4598. The effect of SEQ ID NO: 88 is statistically different from the effects of SEQ ID NO: 4597 and of SEQ ID NO: 4598, Student T test, *p<0.05, NS=not statistically significant, n=3 per condition. Cells are transfected at T=0, data normalized on cell confluence at T=0 for each tested condition and shown as mean±SEM.

[0068] FIG. 6A shows the average fold-change in fraction of full length of the oligonucleotide (SEQ ID NOs: 88 and 4593) in human serum over time (in vitro incubation at 37° C.). Student T test, *p<0.05 compared to corresponding fraction of full length of SEQ ID NO: 88, data shown as mean±SEM.

[0069] FIG. 6B shows the average fold-change in cell confluency over time following transfection of the oligonucleotide (SEQ ID NOs: 88 and 4593), as described in Example 6. 50 nM, 100 nM and 200 nM of SEQ ID NO: 88 and SEQ ID NO: 4593 were tested. The effect of SEQ ID NO: 4593 is statistically different from the effect of SEQ ID NO: 88 at each tested concentration, Student T test, p<0.05, n=3 per condition, data shown as Mean±SEM.

[0070] FIGS. 7A-B show representative images of MDA-MB-231 cells 5 days after treatment with vehicle (FIG. 7A) and 100 nM of oligonucleotide SEQ: 88 (FIG. 7B).

[0071] FIG. 8 shows the average tumor volume (mm³) change over time following treatment with the oligonucleotide (SEQ ID NO: 4593) in MDA-MB231 human breast adenocarcinoma xenograft model in rat, as described in Example 8. Student T test, *p<0.05 compared to untreated.

### DETAILED DESCRIPTION

[0072] Unless defined otherwise, all technical and scientific terms used herein have the same meaning as commonly understood by those of ordinary skill in the art to which the invention belongs. Although any methods and materials similar or equivalent to those described herein can be used in the practice or testing of the present invention, preferred methods and materials are described. For the purposes of the present invention, the following terms are defined below.

### Definitions

[0073] The articles “a” and “an” are used herein to refer to one or to more than one (i.e., to at least one) of the grammatical object of the article. By way of example, “an element” means one element or more than one element.

[0074] By “about” is meant a quantity, level, value, number, frequency, percentage, dimension, size, amount, weight, or length that varies by as much as 30, 25, 20, 15, 10, 9, 8, 7, 6, 5, 4, 3, 2 or 1% to a reference quantity, level, value, number, frequency, percentage, dimension, size, amount, weight, or length.

[0075] “Binding,” as used in the context of transcription factors binding to therapeutic agents such as oligonucleotide decoys, refers to a direct interaction (e.g., non-covalent bonding between the transcription factor and the oligonucleotide decoy, including hydrogen-bonding, van der Waals bonding, etc.) between a transcription factor and an oligonucleotide decoy. Accordingly, a therapeutic agent such as an oligonucleotide that does not bind to a transcription factor does not directly interact with said transcription factor, and vice versa.

[0076] Throughout this specification, unless the context requires otherwise, the words “comprise,” “comprises,” and “comprising” will be understood to imply the inclusion of a stated step or element or group of steps or elements but not the exclusion of any other step or element or group of steps or elements.

[0077] By “consisting of” is meant including, and limited to, whatever follows the phrase “consisting of:” Thus, the phrase “consisting of” indicates that the listed elements are required or mandatory, and that no other elements may be present. By “consisting essentially of” is meant including any elements listed after the phrase, and limited to other elements that do not interfere with or contribute to the activity or action specified in the disclosure for the listed elements. Thus, the phrase “consisting essentially of” indicates that the listed elements are required or mandatory, but that other elements are optional and may or may not be present depending upon whether or not they materially affect the activity or action of the listed elements.

[0078] “Homology” refers to the percentage number of nucleotides that are identical or constitute conservative substitutions. Homology may be determined using sequence comparison programs such as EMBOSS Pairwise Alignment Algorithm (available from the European Bioinformatics Institute (EBI)), the ClustalW program (also available from the European Bioinformatics Institute (EBI)), or the BLAST program (BLAST Manual, Altschul et al., Natl Cent. Biotechnol. Inf., Natl Lib. Med. (NCIB NLM NIH), Bethesda, Md., and Altschul et al., (1997) NAR 25:3389 3402), or GAP (Deveraux et al., 1984, Nucleic Acids Research 12, 387-395). In this way sequences of a similar or substantially different length to those cited herein could be compared by insertion of gaps into the alignment, such gaps being determined, for example, by the comparison algorithm used by GAP.

[0079] By “isolated” is meant material that is substantially or essentially free from components that normally accompany it in its native state. For example, an “isolated polynucleotide” or “isolated oligonucleotide,” as used herein, may refer to a polynucleotide that has been purified or removed from the sequences that flank it in a naturally-occurring state, e.g., a DNA fragment that is removed from the sequences that are adjacent to the fragment in the genome. The term “isolating” as it relates to cells refers to the purification of cells (e.g., fibroblasts, lymphoblasts) from a source subject (e.g., a subject with a polynucleotide repeat disease). In the context of mRNA or protein, “isolating” refers to the recovery of mRNA or protein from a source, e.g., cells.

[0080] The term “modulate” includes an “increase” or “decrease” one or more quantifiable parameters, optionally by a defined and/or statistically significant amount. By “increase” or “increasing,” “enhance” or “enhancing,” or “stimulate” or “stimulating,” refers generally to the ability of one or more agents such as oligonucleotide decoys to produce or cause a greater physiological or cellular response in a cell or a subject, such as the activity of a transcription factor (e.g., gene expression), relative to the response caused by either no agent or a control compound. Relevant physiological or cellular responses (in vivo or in vitro) will be apparent to persons skilled in the art. An “increased” or “enhanced” amount or response may be “statistically significant” relative to an amount or response produced by no agent or a control composition, and may include an increase that is 1.1, 1.2, 2, 3, 4, 5, 6, 7, 8, 9, 10, 15, 20, 30, 40, 50 or more times (e.g., 500, 1000 times) (including all integers and ranges between and above 1, e.g., 1.5, 1.6, 1.7. 1.8) the amount or response produced by either no agent or a control compound. The term “reduce” or “inhibit” may relate generally to the ability of one or more agents such as oligonucleotide decoys to “decrease” a relevant pathological or physiological or cellular response in a cell or a subject, such as the activity of a transcription factor (e.g., gene expression), a pathological process (e.g., breast cancer signaling), or a symptom of a disease or condition described herein (e.g., breast cancer), relative to the response caused by either no agent or a control compound. Relevant physiological or cellular responses (in vivo or in vitro) will be apparent to persons skilled in the art and can be measured according to routine techniques. A “decrease” in a response may be “statistically significant” as compared to the response produced by no agent or a control composition, and may include a 1%, 2%, 3%, 4%, 5%, 6%, 7%, 8%, 9%, 10%, 11%, 12%, 13%, 14%, 15%, 16%, 17%, 18%, 19%, 20%, 25%, 30%, 35%, 40%, 45%, 50%, 55%, 60%, 65%, 70%, 75%, 80%, 85%, 90%, 95%, or 100% decrease, including all integers and ranges in between.

[0081] “Modulation of gene expression level” includes any change in gene expression level, including an induction or activation (e.g., an increase in gene expression), an inhibition or suppression (e.g., a decrease in gene expression), or a stabilization (e.g., prevention of the up-regulation or down-regulation of a gene that ordinarily occurs in response to a stimulus, such as a cancer-inducing stimulus).

[0082] “Cancer signaling” refers to molecular and cellular mechanisms involved in the genesis (e.g., cell transformation), the growth (e.g., cell proliferation), the expansion and propagation (eg epithelial-mesenchymal transformation, cell migration or tissue invasion.

[0083] “Cancer” refers to Cancer is a generic term for a large group of diseases that can affect any part of the body. Other terms used are malignant tumours and neoplasms. One defining feature of cancer is the rapid creation of abnormal cells that grow beyond their usual boundaries, and which can then invade adjoining parts of the body and spread to other organs; the latter process is referred to as metastasis.

[0084] “Preventing” or “prevention” includes (1) a reduction in the risk of acquiring a disease or disorder (e.g., causing at least one of the clinical symptoms of a disease not to develop in a patient that may be exposed to or predisposed to the disease but does not yet experience or display symptoms of the disease), and/or (2) a reduction in the likely severity of a symptom associated with a disease or disorder (e.g., reducing the likely severity of at least one of the clinical symptoms of a disease in a patient that may be exposed to or predisposed to the disease but does not yet experience or display symptoms of the disease).

[0085] The terms “sequence identity” or, for example, comprising a “sequence 50% identical to,” as used herein, refer to the extent that sequences are identical on a nucleotide-by-nucleotide basis over a window of comparison. Thus, a “percentage of sequence identity” may be calculated by comparing two optimally aligned sequences over the window of comparison, determining the number of positions at which the identical nucleic acid base (e.g., A, T. C, or G) occurs in both sequences to yield the number of matched positions, dividing the number of matched positions by the total number of positions in the window of comparison (i.e., the window size), and multiplying the result by 100 to yield the percentage of sequence identity. In some embodiments, optimal alignment of sequences for aligning a comparison window may be conducted by using the EMBOSS Pairwise Alignment Algorithm (available from the European Bioinformatics Institute (EBI)), the ClustalW program (also available from the European Bioinformatics Institute (EBI)), or the BLAST program (BLAST Manual, Altschul et al., Natl Cent. Biotechnol. Inf., Natl Lib. Med. (NCIB NLM NIH), Bethesda, Md., and Altschul et al., (1997) NAR 25:3389 3402). In certain embodiments, the alignment of sequences for aligning a comparison window is conducted against the entire length of the reference sequence (e.g., from the Sequence Listing). In some embodiments, the alignment of sequences for aligning a comparison window is conducted against a portion of the reference sequence, for example, about, at least about, or no more than about 10, 11, 12, 13, 14, 15, 16, 17, 18, 19, 20, 21, 22, 23, 24, 25, 26, 27, 28, 29, 30, 31, 32, 33, 34, 35, 36, 37, 38, 39, 40, 41, 42, 43, 44, 45, 46, 47, 48, 49, 50, 60, 70, 80, 90, or 100 contiguous nucleotides of the reference sequence.

[0086] A “subject” or a “subject in need thereof” or a “patient” includes a mammalian subject such as a primate or human subject.

[0087] “Treating” or “treatment” of any disease or disorder refers, in some embodiments, to ameliorating the disease or disorder (e.g., arresting or reducing the development of the disease or at least one of the clinical symptoms thereof). In some embodiments, “treating” or “treatment” refers to ameliorating at least one physical and/or biological parameter, which may not be discernible by the patient. In certain embodiments, “treating” or “treatment” refers to inhibiting the disease or disorder, either physically, (e.g., stabilization of a discernible symptom), physiologically, (e.g., stabilization of a physical parameter) or both. In some embodiments, “treating” or “treatment” refers to delaying the onset of the disease or disorder. “Treatment” or “prophylaxis” does not necessarily indicate complete eradication, cure, or prevention of the disease or condition, or associated symptoms thereof.

[0088] “Therapeutically effective amount” means the amount of a compound that, when administered to a patient, is sufficient to effect such treatment of a particular disease or condition. The “therapeutically effective amount” will vary depending on the compound, the disease, the severity of the disease, and the age, weight, etc., of the patient to be treated.

[0089] “Transcription factor network” means the network of regulatory interactions between transcription factors.

### Oligonucleotide Decoys and Other Therapeutic Agents

[0090] Embodiments of the present invention relate generally to therapeutic agents that inhibit binding of at least one transcription factor to at least one of its (endogenous) transcription binding site. Particular examples include oligonucleotide decoys that comprise one or more transcription binding sites that bind to at least one transcription factor, and thereby alter the ability of the transcription factor(s) to modulate gene expression. In embodiments, the oligonucleotide decoy binds to 1 to about 50 transcription factors, for example, 1, 2, 3, 4, 5, 6, 7, 8, 9, 10, 11, 12, 13, 14, 15, 16, 17, 18, 19, 20, 21, 22, 23, 24, 25, 26, 27, 28, 29, 30, 31, 32, 33, 34, 35, 36, 37, 38, 39, 40, 41, 42, 43, 44, 45, 46, 47, 48, 49, or 50 transcription factors, including any values or ranges thereof. In embodiments, the oligonucleotide decoy binds 1 to 40 transcription factors. In embodiments, the oligonucleotide decoy binds 2 to 40 transcription factors. In embodiments, the oligonucleotide decoy binds 2 to 30 transcription factors. In embodiments, the oligonucleotide decoy binds 2 to 20 transcription factors. In embodiments, the oligonucleotide decoy binds 2 to 10 transcription factors. In embodiments, the oligonucleotide decoy binds 2 to 5 transcription factors. In embodiments, the oligonucleotide decoy binds 18 to 22 transcription factors.

[0091] In embodiments, the oligonucleotide decoy comprises 1-50 (e.g., 1, 2, 3, 4, 5, 6, 7, 8, 9, 10, 11, 12, 13, 14, 15, 16, 17, 18, 19, 20, 21, 22, 23, 24, 25, 26, 27, 28, 29, 30, 31, 32, 33, 34, 35, 36, 37, 38, 39, 40, 41, 42, 43, 44, 45, 46, 47, 48, 49, or 50, including any values or ranges therebetween) transcription factor binding sites that overlap. In embodiments, the oligonucleotide decoy comprises 2 to 40, 2 to 35, 2 to 30, 2 to 25, 2 to 20, 3 to 40, 3 to 35, 3 to 30, 3 to 25, or 3 to 20, including any values or ranges therebetween, transcription factor binding sites that overlap. In embodiments, the oligonucleotide decoy comprises 3 to 40 transcription factor binding sites that overlap. In embodiments, the oligonucleotide decoy comprises transcription factor binding sites that do not overlap.

[0092] In certain embodiments, the transcription factor is one or more members of following transcription factors: BCL11A, CxxC domain-containing proteins (e.g., CXXC5), E2F (e.g., E2F5, E2F3), FOX (e.g., FOXC1, FOXM1), GTF2IRD1, HMGA1, HOXB5, LYL1, MAF (e.g., c-MAF, MAF-k), MAX, MYC, NFIL3, TCF (e.g., TCF3, TCF4, TCF7L1), TGIF2, XBP1, YBX1, YY1, ZEB2 and closely related factors.

[0093] Thus, certain embodiments include an oligonucleotide decoy that comprises one or more (e.g., 1, 2, 3, 4, 5, etc.) transcription factor binding sites, where the one or more transcription factor binding site binds to a transcription factor selected from the group consisting of BCL11A, CxxC domain-containing proteins (e.g., CXXC5), E2F (e.g., E2F5, E2F3), FOX (e.g., FOXC1, FOXM1), GTF2IRD1, HMGA1, HOXB5, LYL1, MAF (e.g., c-MAF, MAF-k), MAX, MYC, NFIL3, TCF (e.g., TCF3, TCF4, TCF7L1), TGIF2, XBP1, YBX1, YY1, ZEB2 and closely related factors.

[0094] Also included are oligonucleotide decoys that comprise a combination of at least two (e.g., 2, 3, 4, 5, etc.) transcription factor binding sites, wherein each transcription factor binding site binds to a transcription factor selected from the group consisting of BCL11A, CxxC domain-containing proteins (e.g., CXXC5), E2F (e.g., E2F5, E2F3), FOX (e.g., FOXC1, FOXM1), GTF2IRD1, HMGA1, HOXB5, LYL1, MAF (e.g., c-MAF, MAF-k), MAX, MYC, NFIL3, TCF (e.g., TCF3, TCF4, TCF7L1), TGIF2, XBP1, YBX1, YY1, ZEB2 and closely related factors. Particular examples of combinations of transcription factor binding sites include those that bind to YBX1 and/or YY1, and/or ZEB2 and/or FOXM1 and/or FOXC1 and/or MAX and/or XBP1 and/or CXXC5 and/or NFIL3 and/or TCF4 and/or TCF7L1 and/or TGIF2 and/or MAF and/or LYL1 and/or GTF2IRD1 and/or E2F3 and/or E2F5 and/or BCL11A and/or HOXB5 and/or HMGA1.

[0095] The term “oligonucleotide” includes any double-stranded or substantially double-stranded, nucleic acid-containing polymer generally less than approximately 200 nucleotides (or 100 base pairs) and including, but not limited to, DNA, RNA and RNA-DNA hybrids with potential 5′ and/or 3′ overhangs.

[0096] In some embodiments, the oligonucleotide is about, at least about, or no more than about, 10, 11, 12, 13, 14, 15, 16, 17, 18, 19, 20, 21, 22, 23, 24, 25, 26, 27, 28, 29, 30, 31, 32, 33, 34, 35, 36, 37, 38, 39, 40, 41, 42, 43, 44, 45, 46, 47, 48, 49, 50, 60, 70, 80, 90, 100, 110, 120, 130, 140, 150, 160, 170, 180, 190, or 200 nucleotides in length (including all integers and ranges in between), and optionally comprises about, at least about, or no more than about, 10, 11, 12, 13, 14, 15, 16, 17, 18, 19, 20, 21, 22, 23, 24, 25, 26, 27, 28, 29, 30, 31, 32, 33, 34, 35, 36, 37, 38, 39, 40, 41, 42, 43, 44, 45, 46, 47, 48, 49, 50, 60, 70, 80, 90, 100, 110, 120, 130, 140, 150, 160, 170, 180, 190, or 200 base-paired nucleotides (including all integers and ranges in between). In embodiments, the oligonucleotide decoy is about 15 to about 60 base pairs in length. In embodiments, the oligonucleotide decoy is about 10 to about 100 base pairs in length. In embodiments, the oligonucleotide decoy is 12, 17, 18, 29, 41, 44, or 57-nucleotides in length.

[0097] In some embodiments, the oligonucleotide decoy comprises a first transcription factor binding site and a second or a third transcription up to 40 or more binding sites, optionally wherein the first transcription binding site and the second transcription binding site overlap and/or are in reverse orientation. In some embodiments, two double-stranded oligonucleotides overlap by at least 1-20 base pairs, for example, about 1, 2, 3, 4, 5, 6, 7, 8, 9, 10, 11, 12, 13, 14, 15, 16, 17, 18, 19, or 20 base pairs, including all values and ranges thereof. In some embodiments, the two double-stranded oligonucleotides overlap, and the two double-stranded oligonucleotides comprise 2, 3, 4, 5, 6, 7, 8, 9, or 10 consecutive identical base pairs. In specific embodiments, the first transcription factor binding site binds to a transcription factor selected from the group consisting of BCL11A, CxxC domain-containing proteins (e.g., CXXC5), E2F (e.g., E2F5, E2F3), FOX (e.g. FOXC1, FOXM1), GTF2IRD1, HMGA1, HOXB5, LYL1, MAF (e.g. c-MAF, MAF-k), MAX, MYC, NFIL3, TCF (e.g., TCF3, TCF4, TCF7L1), TGIF2, XBP1, YBX1, YY1, ZEB2 and closely related factors.

[0098] In some embodiments, the oligonucleotide decoy has flank sequences on its 5′ and/or 3 sides beyond transcription factor binding sites sequences. Flanks are short sequences, typically but not limited from 1 to 10 nucleotides that are added on the side of the sequences covered under this application. For instance, flanks to seq ID: 1 AACAAAGATTAA could be at/at and ccgc that could be added as follow to seq ID: 1 atatAACAAAGATTAAcgcg.

[0099] In certain embodiments, the oligonucleotide decoy (e.g., the sense strand of the decoy) comprises, consists, or consists essentially of a sequence (e.g., double-stranded sequence) from Table A.

[0100] Certain oligonucleotide decoys thus comprise, consist, or consist essentially of a sequence in Table A (e.g., SEQ ID NO: 1 to 48 for binding to TCF7L1 and GTF2IRD1, SEQ ID NO: 49 to SEQ ID NO: 64 for binding to FOXC1, FOXM1, GTF2IRD1 and TCF7L1, SEQ ID NO: 65 to SEQ ID NO: 176 for binding to E2F3, E2F5, FOXC1, FOXM1, GTF2IRD1, LYL1, TCF4, TCF7L1, TGIF2 and ZEB2, SEQ ID NO: 177 to SEQ ID NO: 3760 for binding to CXXC5, FOXC1, FOXM1, MAX, NFIL3, TCF4, XBP1, YBX1, YY1, ZEB2, SEQ ID NO: 3761 to SEQ ID NO: 3868 for binding to BCL11A, HMGA1, HOXB5 and MAF, SEQ ID NO: 3869 to SEQ ID NO: 4540 for binding to BCL11A, E2F3, E2F5, FOXC1, FOXM1, GTF2IRD1, HMGA1, HOXB5, LYL1, MAF, TCF4, TCF7L1, TGIF2 and ZEB2) or a variant of different size for the same transcription factor targets.

[0101] For instance, certain oligonucleotide decoys comprise contiguous or non-contiguous nucleotides of any of the sequences that bind to one or more transcription factors from the group consisting of: BCL11A, CxxC domain-containing proteins (e.g., CXXC5), E2F (e.g., E2F5, E2F3), FOX (e.g., FOXC1, FOXM1), GTF2IRD1, HMGA1, HOXB5, LYL1, MAF (e.g., c-MAF, MAF-k), MAX, MYC, NFIL3, TCF (e.g., TCF3, TCF4, TCF7L1), TGIF2, XBP1, YBX1, YY1, ZEB2 and closely related factors. For non-contiguous portions, intervening nucleotides can be deleted or substituted with a different nucleotide, or intervening nucleotides can be added. Additional examples of variants include oligonucleotide decoys having at least about 70% sequence identity or homology (e.g., 70%, 71%, 72%, 73%, 74%, 75%, 76%, 77%, 78%, 79%, 80%, 81%, 82%, 83%, 84%, 85%, 86%, 87%, 88%, 89%, 90%, 91%, 92%, 93%, 94%, 95%, 96%, 97%, 98%, 99% or 100% sequence identity or homology) to the entire length or a contiguous portion of a sequence.

[0102] In some embodiments, the contiguous portion is about, at least about, or no more than about 10, 11, 12, 13, 14, 15, 16, 17, 18, 19, 20, 21, 22, 23, 24, 25, 26, 27, 28, 29, 30, 31, 32, 33, 34, 35, 36, 37, 38, 39, 40, 41, 42, 43, 44, 45, 46, 47, 48, 49, 50, 60, 70, 80, 90, or 100 contiguous nucleotides of a sequence.

[0103] An oligonucleotide decoy having a certain percent (e.g., 65%, 70%, 75%, 80%, 85%, 90%, 95%, or 99%) of sequence identity with another sequence means that, when aligned, that percentage determines the level of correspondence of bases arrangement in comparing the two sequences. This alignment and the percent homology or identity can be determined using any suitable software program known in the art that allows local alignment. In some embodiments, such programs include but are not limited to the EMBOSS Pairwise Alignment Algorithm (available from the European Bioinformatics Institute (EBI)), the ClustalW program (also available from the European Bioinformatics Institute (EBI)), or the BLAST program (BLAST Manual, Altschul et al., Natl Cent. Biotechnol. Inf., Natl Lib. Med. (NCIB NLM NIH), Bethesda, Md., and Altschul et al., (1997) NAR 25:3389 3402).

[0104] As noted above, one skilled in the art will recognize that the sequences encompassed by the invention include those that are fully or partially complementary to the sequences described herein, including those that hybridize under stringent hybridization conditions with an exemplified sequence. A nucleic acid is hybridizable to another nucleic acid when a single stranded form of the nucleic acid can anneal to the other single stranded nucleic acid under appropriate conditions of temperature and solution ionic strength. Hybridization conditions are well known in the art. In some embodiments, annealing may occur during a slow decrease of temperature from a denaturizing temperature (e.g., 100° C.) to room temperature in a water and/or salt containing solvent (e.g., Tris-EDTA buffer).

[0105] The population of oligonucleotide decoys can be composed of one oligonucleotide decoy, or a combination of two or more (e.g., 2, 3, 4, 5, etc.) oligonucleotide decoys. In certain embodiments, the population of oligonucleotide decoys is composed of one oligonucleotide decoy with a single transcription factor binding site from the list: BCL11A, CxxC domain-containing proteins (e.g., CXXC5), E2F (e.g., E2F5, E2F3), FOX (e.g., FOXC1, FOXM1), GTF2IRD1, HMGA1, HOXB5, LYL1, MAF (e.g. c-MAF, MAF-k), MAX, MYC, NFIL3, TCF (e.g., TCF3, TCF4, TCF7L1), TGIF2, XBP1, YBX1, YY1, ZEB2 and closely related factors. In some embodiments, the population of oligonucleotide decoys is composed of one oligonucleotide decoy with combination of at least two (e.g., 2, 3, 4, 5, etc.) transcription factor binding sites, which bind to factors from the list: BCL11A, CxxC domain-containing proteins (e.g., CXXC5), E2F (e.g., E2F5, E2F3), FOX (e.g. FOXC1, FOXM1), GTF2IRD1, HMGA1, HOXB5, LYL1, MAF (e.g. c-MAF, MAF-k), MAX, MYC, NFIL3, TCF (e.g., TCF3, TCF4, TCF7L1), TGIF2, XBP1, YBX1, YY1, ZEB2 and closely related factors. In some embodiments, the population of oligonucleotide decoys comprises one oligonucleotide decoy with combination of at least three (e.g., 3, 4, 5, etc.) transcription factor binding sites, which bind to the same or different (e.g., three or at least three different) factors from the list: BCL11A, CxxC domain-containing proteins (e.g., CXXC5), E2F (e.g., E2F5, E2F3), FOX (e.g. FOXC1, FOXM1), GTF2IRD1, HMGA1, HOXB5, LYL1, MAF (e.g. c-MAF, MAF-k), MAX, MYC, NFIL3, TCF (e.g., TCF3, TCF4, TCF7L1), TGIF2, XBP1, YBX1, YY1, ZEB2 and closely related factors. Other combinations will be apparent to persons skilled in the art.

[0106] In embodiments, the oligonucleotide decoy comprises a nucleotide sequence that is at least 80%, at least 85%, at least 90%, at least 95%, or 100% identical to a sequence selected from the group consisting of SEQ ID NO: 1 to SEQ ID NO: 48. In embodiments, the oligonucleotide decoy binds to one or more transcription factors selected from the group consisting of: TCF7L1 and GTF2IRD1. In embodiments, the present disclosure provides a nucleotide sequence that is at least 80%, at least 85%, at least 90%, at least 95%, or 100% identical to a sequence selected from the group consisting of SEQ ID NO: 49 to SEQ ID NO: 64. In embodiments, the oligonucleotide decoy binds to one or more transcription factors selected from the group consisting of: FOXC1, FOXM1, GTF2IRD1, and TCF7L1.

[0107] In embodiments, the present disclosure provides a nucleotide sequence that is at least 80%, at least 85%, at least 90%, at least 95%, or 100% identical to a sequence selected from the group consisting of SEQ ID NO: 3761 to SEQ ID NO: 3836. In embodiments, the oligonucleotide decoy binds to one or more transcription factors selected from the group consisting of: BCL11A, HMGA1, HOXB5, and MAF.

[0108] In embodiments, the present disclosure provides a nucleotide sequence that is at least 80%, at least 85%, at least 90%, at least 95%, or 100% identical to a sequence selected from the group consisting of SEQ ID NO: 3837 to SEQ ID NO: 3868. In embodiments, the oligonucleotide decoy binds to one or more transcription factors selected from the group consisting of: BCL11A, HMGA1, HOXB5, and MAF.

[0109] In embodiments, the present disclosure provides a nucleotide sequence that is at least 80%, at least 85%, at least 90%, at least 95%, or 100% identical to a sequence selected from the group consisting of SEQ ID SEQ ID NO: 65 to SEQ ID NO: 176, and SEQ ID NO: 4593. In embodiments, the oligonucleotide decoy binds to one or more transcription factors selected from the group consisting of: E2F3, E2F5, FOXC1, FOXM1, GTF2IRD1, LYL1, TCF4, TCF7L1, TGIF2, and ZEB2.

[0110] In embodiments, the present disclosure provides a nucleotide sequence that is at least 80%, at least 85%, at least 90%, at least 95%, or 100% identical to a sequence selected from the group consisting of SEQ ID SEQ ID NO: 177 to SEQ ID NO: 3760. In embodiments, the oligonucleotide decoy binds to one or more transcription factors selected from the group consisting of: CXXC5, FOXC1, FOXM1, MAX, NFIL3, TCF4, XBP1, YBX1, YY1, and ZEB2.

[0111] In embodiments, the present disclosure provides a nucleotide sequence that is at least 80%, at least 85%, at least 90%, at least 95%, or 100% identical to a sequence selected from the group consisting of SEQ ID SEQ ID NO: 3869 to SEQ ID NO: 4540. In embodiments, the oligonucleotide decoy binds to one or more transcription factors selected from the group consisting of: BCL11A, E2F3, E2F5, FOXC1, FOXM1, GTF2IRD1, HMGA1, HOXB5, LYL1, MAF, TCF4, TCF7L1, TGIF2, and ZEB2.

[0112] In embodiments, the oligonucleotide decoy binds to one or more transcription factors selected from the group consisting of: BCL11A, CxxC domain-containing proteins (e.g., CXXC5), E2F (e.g., E2F5, E2F3), FOX (e.g., FOXC1, FOXM1), GTF2IRD1, HMGA1, HOXB5, LYL1, MAF (e.g., c-MAF, MAF-k), MAX, MYC, NFIL3, TCF (e.g., TCF3, TCF4, TCF7L1), TGIF2, XBP1, YBX1, YY1, ZEB2 and closely related factors.

[0113] In embodiments, the present disclosure provides a nucleotide sequence that is at least 80%, at least 85%, at least 90%, at least 95%, or 100% identical to a sequence selected from the group consisting of SEQ ID NO: 88, SEQ ID NO: 4593, SEQ ID NO: 4594, SEQ ID NO: 4595, SEQ ID NO: 4596, SEQ ID NO:4547, and SEQ ID NO: 4598.

[0114] In embodiments, the present disclosure provides a nucleotide sequence that is at least 80%, at least 85%, at least 90%, at least 95%, or 100% identical to a sequence selected from the group consisting of SEQ ID NO: 88, SEQ ID NO: 4593, SEQ ID NO: 4594, SEQ ID NO: 4595, SEQ ID NO: 4596, SEQ ID NO:4547, and SEQ ID NO: 4598.

[0115] Generally, the oligonucleotide decoys disclosed herein may be used to bind and, e.g., thereby inhibit, transcription factors that modulate the expression of genes involved cancer signaling. An oligonucleotide decoy that is designed to bind to a specific transcription factor has a nucleic acid sequence mimicking the endogenous genomic DNA sequence normally bound by the transcription factor. Accordingly, in some aspects the oligonucleotide decoys disclosed herein inhibit a necessary step for gene expression and regulation. Further, the oligonucleotide decoys disclosed herein may bind to one or a number of different transcription factors.

[0116] The term oligonucleotide encompasses sequences that include any of the known base analogs of DNA and RNA including, but not limited to, 2,6-diaminopurine, 5-carboxymethylaminomethyl-2-thiouracil, 5-carboxymethylaminomethyluracil, dihydrouracil, inosine, uracil-5-oxyacetic acid, N6-isopentenyladenine, 1-methyladenine, N-uracil-5-oxyacetic acid methylester, queosine, 2-thiocytosine, 5-bromouracil, methylphosphonate, phosphorodithioate, ormacetal, 3′-thioformacetal, nitroxide backbone, sulfone, sulfamate, morpholino derivatives, locked nucleic acid (LNA) derivatives, and/or peptide nucleic acid (PNA) derivatives. In some embodiments, the oligonucleotide is composed of two complementary single-stranded oligonucleotides that are annealed together. In some embodiments, the oligonucleotide is composed of one single-stranded oligonucleotide that forms intramolecular base pairs to create a substantially double-stranded structure.

[0117] In some embodiments, the oligonucleotide decoys disclosed herein are chemically modified by methods well known to the skilled artisan (e.g., incorporation of phosphorothioate, methylphosphonate, phosphorodithioate, phosphoramidates, carbonate, thioether, siloxane, acetamidate or carboxymethyl ester linkages between nucleotides), for example, to prevent degradation by nucleases within cells and/or in extra-cellular fluids (e.g., serum, cerebrospinal fluid). In some embodiments, the oligonucleotide decoys are designed to form hairpin and dumbbell structures, which can also prevent or hinder nuclease degradation. In particular embodiments, the oligonucleotide decoys are inserted as a portion of a larger plasmid capable of episomal maintenance or constitutive replication in the target cell in order to provide longer-term, enhanced intracellular exposure to the decoy sequence and/or reduce its degradation. Accordingly, any chemical modification or structural alteration known in the art to enhance oligonucleotide stability is within the scope of the present disclosure. In some embodiments, the oligonucleotide decoys disclosed herein may be attached, for example, to polyethylene glycol polymers, peptides (e.g., a protein translocation domain) or proteins which improve the therapeutic effect of oligonucleotide decoys. Such modified oligonucleotide decoys may preferentially traverse the cell membrane.

[0118] The oligonucleotide decoys described herein may generally be utilized as the free acid or free base. Alternatively, the oligonucleotide decoys may be used in the form of acid or base addition salts. Acid addition salts of the free amino compounds of the present invention may be prepared by methods well known in the art, and may be formed from organic and inorganic acids. Suitable organic acids include maleic, fumaric, benzoic, ascorbic, succinic, methanesulfonic, acetic, trifluoroacetic, oxalic, propionic, tartaric, salicylic, citric, gluconic, lactic, mandelic, cinnamic, aspartic, stearic, palmitic, glycolic, glutamic, and benzenesulfonic acids.

[0119] Suitable inorganic acids include hydrochloric, hydrobromic, sulfuric, phosphoric, and nitric acids. Base addition salts included those salts that form with the carboxylate anion and include salts formed with organic and inorganic cations such as those chosen from the alkali and alkaline earth metals (for example, lithium, sodium, calcium, potassium, magnesium, barium and calcium), as well as the ammonium ion and substituted derivatives thereof (e.g., dibenzylammonium, benzylammonium, 2-hydroxyethylammonium, and the like). Thus, the term “pharmaceutically acceptable salt” is intended to encompass any and all acceptable salt forms.

[0120] Prodrugs are also included. Prodrugs are any covalently bonded carriers that release a compound in vivo when such prodrug is administered to a patient. Prodrugs are generally prepared by modifying functional groups in a way such that the modification is cleaved, either by routine manipulation or in vivo, yielding the parent compound. Prodrugs include, for example, compounds of this invention wherein hydroxy, amine or sulfhydryl groups are bonded to any group that, when administered to a patient, cleaves to form the hydroxy, amine or sulfhydryl groups. Thus, representative examples of prodrugs include (but are not limited to) acetate, formate and benzoate derivatives of alcohol and amine functional groups of the oligonucleotide decoys described herein. Further, in the case of a carboxylic acid (—COOH), esters may be employed, such as methyl esters, ethyl esters, and the like.

[0121] In certain embodiments, the oligonucleotide decoys are provided as salts, hydrates, solvates, or N-oxide derivatives. In certain embodiments, the oligonucleotide decoys are provided in solution (e.g., a saline solution having a physiologic pH) or in lyophilized form. In some embodiments, the oligonucleotide decoys are provided in liposomes.

[0122] The oligonucleotide decoys described herein may be made by conventional methods known in the art and thus are well within the knowledge of the skilled artisan. The activity of oligonucleotide decoys and variants thereof can be assayed according to routine techniques in the art (see the Examples). In particular embodiments, the oligonucleotide decoy is a synthetic oligonucleotide (i.e., a chemically-synthesized, non-naturally-occurring oligonucleotide).

[0123] Also included are non-oligonucleotide-based therapeutic agents, including those that inhibit binding of a transcription factor to its endogenous transcription binding site, for instance, by specifically binding to a KLF transcription factor, or by specifically binding to its endogenous transcription factor binding site (e.g., by mimicking the ZEB2 or FOXM1 transcription factor binding site). Examples of therapeutic agents include binding agents such as antibodies, small molecules, peptides, adnectins, anticalins, DARPins, anaphones, and aptamers, which exhibit binding specificity for a transcription factor from the list: BCL11A, CxxC domain-containing proteins (e.g., CXXC5), E2F (e.g., E2F5, E2F3), FOX (e.g. FOXC1, FOXM1), GTF2IRD1, HMGA1, HOXB5, LYL1, MAF (e.g. c-MAF, MAF-k), MAX, MYC, NFIL3, TCF (e.g., TCF3, TCF4, TCF7L1), TGIF2, XBP1, YBX1, YY1, ZEB2 and closely related factors., e.g., a ZEB2 or FOXM1 factor transcription factor binding site domain, or which exhibit binding specificity for an endogenous ZEB2 or FOXM1 transcription factor binding site.

[0124] A binding agent is said to “exhibit binding specificity for,” “specifically bind to,” a transcription factor polypeptide (e.g., a transcription factor binding domain thereof), or an endogenous transcription factor binding site (e.g., double-stranded DNA sequence), if it reacts at a detectable level (within, for example, an ELISA or multiplex assay or an equivalent binding assay) with the polypeptide or nucleic acid, and does not react detectably in a significant (e.g., statistically significant) manner with unrelated structures under similar conditions.

[0125] The term “antibody” relates to an immunoglobulin whether natural or partly or wholly synthetically produced. The term also covers any polypeptide or protein having a binding domain which is, or is homologous to, an antigen-binding domain. CDR grafted antibodies are also contemplated by this term. The term “antigen-binding portion of an antibody,” “antigen-binding fragment,” “antigen-binding domain,” “antibody fragment” or a “functional fragment of an antibody” are used interchangeably in the present invention to include one or more fragments of an antibody that retain the ability to specifically bind to an antigen (see, e.g., Holliger et al., Nature Biotech. 23 (9): 1126-1129 (2005), which is hereby incorporated by reference in its entirety).

[0126] Antibodies may be prepared by any of a variety of techniques known to those of ordinary skill in the art. See, e.g., Harlow and Lane, Antibodies: A Laboratory Manual, Cold Spring Harbor Laboratory, 1988 which are hereby incorporated by reference in their entireties. Monoclonal antibodies specific for a polypeptide of interest may be prepared, for example, using the technique of Kohler and Milstein, Eur. J. Immunol. 6:511-519, 1976, and improvements thereto. Also included are methods that utilize transgenic animals such as mice to express human antibodies. See, e.g., Neuberger et al., Nature Biotechnology 14:826, 1996; Lonberg et al., Handbook of Experimental Pharmacology 113:49-101, 1994; and Lonberg et al., Internal Review of Immunology 13:65-93, 1995 which are hereby incorporated by reference in their entireties. Particular examples include the VELOCIMMUNE® platform by REGENEREX® (see, e.g., U.S. Pat. No. 6,596,541 which is hereby incorporated by reference in its entirety) Antibodies can also be generated or identified by the use of phage display or yeast display libraries (see, e.g., U.S. Pat. No. 7,244,592; Chao et al., Nature Protocols. 1:755-768, 2006 which are hereby incorporated by reference in their entireties).

[0127] As noted above, “peptides” that inhibit binding of a transcription factor to its transcription factor binding site are included as binding agents. The term peptide typically refers to a polymer of amino acid residues and to variants and synthetic analogues of the same. In certain embodiments, the term “peptide” refers to relatively short polypeptides, including peptides that consist of about 3, 4, 5, 6, 7, 8, 9, 10, 11, 12, 13, 14, 15, 16, 17, 18, 19, 20, 25, 30, 31, 32, 33, 34, 35, 36, 37, 38, 39, 40, 41, 42, 43, 44, 45, 46, 47, 48, 49, 50 or more amino acids, including all integers and ranges (e.g., 5-10, 8-12, 10-15, 15-20, 20-25, 25-30, 30-40, 40-50) in between, and which, for example, bind to one or more regions of a KLF transcription factor, e.g., a transcription factor binding domain, or mimic the transcription factor by binding to at least one of its endogenous transcription factor binding sites. Peptides can be composed of naturally-occurring amino acids and/or non-naturally occurring amino acids.

[0128] As noted above, the present invention includes small molecules that inhibit binding of a transcription factor to its transcription factor binding site. A “small molecule” refers to an organic or inorganic compound that is of synthetic or biological origin, but is typically not a polymer. Organic compounds include a large class of chemical compounds whose molecules contain carbon, typically excluding those that contain only carbonates, simple oxides of carbon, or cyanides. A “polymer” refers generally to a large molecule or macromolecule composed of repeating structural units, which are typically connected by covalent chemical bond. In certain embodiments, a small molecule has a molecular weight of less than 1000-2000 Daltons, typically between about 300 and 700 Daltons, and including about 50, 100, 150, 200, 250, 300, 350, 400, 450, 500, 550, 500, 650, 600, 750, 700, 850, 800, 950, 1000 or 2000 Daltons.

[0129] Aptamers that inhibit binding of a transcription factor to its transcription factor binding site are also included as binding agents (see, e.g., Ellington et al., Nature. 346, 818-22, 1990; and Tuerk et al., Science. 249, 505-10, 1990, which are hereby incorporated by reference in their entireties). Examples of aptamers included nucleic acid aptamers (e.g., DNA aptamers, RNA aptamers) and peptide aptamers. Nucleic acid aptamers refer generally to nucleic acid species with secondary and tertiary structures that have been engineered through repeated rounds of in vitro selection or equivalent method, such as SELEX (systematic evolution of ligands by exponential enrichment), to bind to various molecular targets such as small molecules, proteins, nucleic acids, and even cells, tissues and organisms. See, e.g., U.S. Pat. Nos. 6,376,190; and 6,387,620, which are hereby incorporated by reference in their entireties. Hence, included are nucleic acid aptamers that bind to one or more regions of a transcription factor, e.g., a transcription factor binding domain, or which bind to at least one of its endogenous transcription factor binding sites.

[0130] Peptide aptamers typically include a variable peptide loop attached at both ends to a protein scaffold, a double structural constraint that typically increases the binding affinity of the peptide aptamer to levels comparable to that of an antibody's (e.g., in the nanomolar range). In certain embodiments, the variable loop length may be composed of about 10-20 amino acids (including all integers in between), and the scaffold may include any protein that has good solubility and compacity properties. Certain exemplary embodiments may utilize the bacterial protein Thioredoxin-A as a scaffold protein, the variable loop being inserted within the reducing active site (-Cys-Gly-Pro-Cys- loop in the wild protein), with the two cysteine lateral chains being able to form a disulfide bridge. Methods for identifying peptide aptamers are described, for example, in U.S. Application No. 2003/0108532, which is hereby incorporated by reference in its entirety. Hence, included are peptide aptamers that bind to one or more regions of a transcription factor, e.g., a transcription factor binding domain, or which bind to at least one of its endogenous transcription factor binding sites. Peptide aptamer selection can be performed using different systems known in the art, including the yeast two-hybrid system.

[0131]

| Also included are ADNECTINS™, AVIMERS™, and ANTICALINS that specifically bind to KLF transcription factor. ADNECTINS™ refer to a class of targeted biologics derived from human fibronectin, an abundant extracellular protein that naturally binds to other proteins. See, e.g., U.S. Application Nos. 2007/0082365; 2008/0139791; and 2008/0220049, which are hereby incorporated by reference in their entireties. ADNECTINS™ typically consists of a natural fibronectin backbone, as well as the multiple targeting domains of a specific portion of human fibronectin. The targeting domains can be engineered to enable an Adnectin™ to specifically recognize a therapeutic target of interest, such as a transcription factor polypeptide, or a fragment thereof, e.g., a transcription factor binding domain, or at least one of its endogenous transcription factor binding sites.

[0132] AVIMERS™ refer to multimeric binding proteins or peptides engineered using in vitro exon shuffling and phage display. Multiple binding domains are linked, resulting in greater affinity and specificity compared to single epitope immunoglobulin domains. See, e.g., Silverman et al., Nature Biotechnology. 23:1556-1561, 2005; U.S. Pat. No. 7,166,697; and U.S. Application Nos. 2004/0175756, 2005/0048512, 2005/0053973, 2005/0089932 and 2005/0221384, which are hereby incorporated by reference in their entireties.

[0133] Also included are designed ankyrin repeat proteins (DARPins), which include a class of non-immunoglobulin proteins that can offer advantages over antibodies for target binding in drug discovery and drug development. Among other uses, DARPins are ideally suited for in vivo imaging or delivery of toxins or other therapeutic payloads because of their favorable molecular properties, including small size and high stability. The low-cost production in bacteria and the rapid generation of many target-specific DARPins make the DARPin approach useful for drug discovery. Additionally, DARPins can be easily generated in multispecific formats, offering the potential to target an effector DARPin to a specific organ or to target multiple polypeptides/nucleic acids with one molecule composed of several DARPins. See, e.g., Stumpp et al., Curr Opin Drug Discov Devel. 10:153-159, 2007; U.S. Application No. 2009/0082274; and PCT/EP2001/10454, which are hereby incorporated by reference in their entireties.

[0134] Certain embodiments include “monobodies,” which typically utilize the 10th fibronectin type III domain of human fibronectin (FNfn10) as a scaffold to display multiple surface loops for target binding. FNfn10 is a small (94 residues) protein with a β-sandwich structure similar to the immunoglobulin fold. It is highly stable without disulfide bonds or metal ions, and it can be expressed in the correctly folded form at a high level in bacteria. The FNfn10 scaffold is compatible with virtually any display technologies. See, e.g., Batori et al., Protein Eng. 15:1015-20, 2002; and Wojcik et al., Nat Struct Mol Biol., 2010; and U.S. Pat. No. 6,673,901, which are hereby incorporated by reference in their entireties.

[0135] Anticalins refer to a class of antibody mimetics, which are typically synthesized from human lipocalins, a family of binding proteins with a hypervariable loop region supported by a structurally rigid framework. See, e.g., U.S. Application No. 2006/0058510, which is hereby incorporated by reference in its entirety. Anticalins typically have a size of about 20 kDa. Anticalins can be characterized by a barrel structure formed by eight antiparallel β-strands (a stable B-barrel scaffold) that are pairwise connected by four peptide loops and an attached a-helix. In certain aspects, conformational deviations to achieve specific binding are made in the hypervariable loop region(s). See, e.g., Skerra, FEBS J. 275:2677-83, 2008, herein incorporated by reference in its entirety.

[0136] The therapeutic agents, e.g. binding agents, described herein which inhibit the binding of a transcription factor comprised of BCL11A, CxxC domain-containing proteins (e.g., CXXC5), E2F (e.g., E2F5, E2F3), FOX (e.g., FOXC1, FOXM1), GTF2IRD1, HMGA1, HOXB5, LYL1, MAF (e.g., c-MAF, MAF-k), MAX, MYC, NFIL3, TCF (e.g., TCF3, TCF4, TCF7L1), TGIF2, XBP1, YBX1, YY1, ZEB2 and closely related factors to its endogenous transcription factor binding site(s), can be used in any of the methods and compositions described herein.

### Methods for Use

[0137] Embodiments of the present invention include methods of using therapeutic agents described herein (e.g., oligonucleotide decoys, binding agents), which inhibit or otherwise reduce binding of one or more transcription factors involved in breast cancer to its endogenous transcription binding site, and related compositions, to modulate the activity of one or more transcription factors involved in breast cancer. In particular embodiments, the one or more transcription factors is selected from the group consisting of BCL11A, CxxC domain-containing proteins (e.g., CXXC5), E2F (e.g., E2F5, E2F3), FOX (e.g., FOXC1, FOXM1), GTF2IRD1, HMGA1, HOXB5, LYL1, MAF (e.g., c-MAF, MAF-k), MAX, MYC, NFIL3, TCF (e.g., TCF3, TCF4, TCF7L1), TGIF2, XBP1, YBX1, YY1, ZEB2 and closely related factors.

[0138] The methods can be used, for example, to treat breast cancer in a subject, to modulate transcription of a gene present in a cell involved in breast cancer signaling, to modulate transcription of a gene present in a cell involved in breast cancer in a subject, and/or to modulate breast cancer signaling in a cell, for example, in a subject. Such methods can be practiced in vitro, for instance, by contacting a cell with a therapeutic agent (e.g., oligonucleotide decoy) or related composition, or in vivo, for instance, by administering to a subject in need thereof a therapeutic agent (e.g., oligonucleotide decoy) or related composition. In particular embodiments, the therapeutic agent is an oligonucleotide decoy or population of oligonucleotide decoys, as described herein.

[0139] Thus, certain embodiments include methods for treating breast cancer in a subject, comprising administering to the subject a therapeutically effective amount of a therapeutic agent, wherein the therapeutic agent inhibits binding of a transcription factor to its transcription binding site, and wherein the transcription factor is selected from the group consisting of BCL11A, CxxC domain-containing proteins (e.g., CXXC5), E2F (e.g., E2F5, E2F3), FOX (e.g. FOXC1, FOXM1), GTF2IRD1, HMGA1, HOXB5, LYL1, MAF (e.g., c-MAF, MAF-k), MAX, MYC, NFIL3, TCF (e.g., TCF3, TCF4, TCF7L1), TGIF2, XBP1, YBX1, YY1, ZEB2 and closely related factors. Also included are methods of treating breast cancer in a subject in need thereof, comprising administering to the subject a therapeutically effective amount of one or more oligonucleotide decoys described herein. In some embodiments, methods of preventing breast cancer in in a subject are provided, for example, prophylactic methods of treating or managing breast cancer. Such methods comprise administering to a subject in need thereof (e.g., a patient likely to develop breast cancer) a therapeutically effective amount of an oligonucleotide decoy described herein.

[0140] Thus, in certain embodiments, an oligonucleotide decoy and/or pharmaceutical composition comprising the same is administered to a subject in need thereof, for example, such as an animal (e.g., a bird, mammal, primate, human patient), suffering from or expected to suffer from breast cancer. In certain embodiments, the oligonucleotide decoys and/or pharmaceutical compositions thereof are administered to a patient, such as an animal, as a preventative measure against breast cancer including, but not limited to, any one or more of the possible forms of breast cancer. In some embodiments, the breast cancer is ER+, PR+, HER2+ or triple negative or combination of thereof (e.g., ER+/HER2+). In certain embodiments, the oligonucleotide decoys and/or pharmaceutical compositions thereof may be used for the prevention of one facet of breast cancer while concurrently treating another aspect of breast cancer.

[0141] In some embodiments, the therapeutic agent (e.g., oligonucleotide decoy, population of oligonucleotide decoys, binding agent) or composition that is administered to treat, manage, and/or prevent breast cancer binds to transcription factors selected from the group consisting of BCL11A, CxxC domain-containing proteins (e.g., CXXC5), E2F (e.g., E2F5, E2F3), FOX (e.g. FOXC1, FOXM1), GTF2IRD1, HMGA1, HOXB5, LYL1, MAF (e.g. c-MAF, MAF-k), MAX, MYC, NFIL3, TCF (e.g., TCF3, TCF4, TCF7L1), TGIF2, XBP1, YBX1, YY1, ZEB2 and closely related factors.

[0142] In particular embodiments, the therapeutic agent (e.g., oligonucleotide decoy, population of oligonucleotide decoys, binding agent) or composition that is administered to treat, manage, and/or prevent breast cancer binds to transcription factors selected from the group consisting of TCF7L1 and GTF2IRD1

[0143] In particular embodiments, the therapeutic agent (e.g., oligonucleotide decoy, population of oligonucleotide decoys, binding agent) or composition that is administered to treat, manage, and/or prevent breast cancer binds to transcription factors selected from the group consisting of TCF7L1, GTF2IRD1, FOXM1 and FOXC1.

[0144] In particular embodiments, the therapeutic agent (e.g., oligonucleotide decoy, population of oligonucleotide decoys, binding agent) or composition that is administered to treat, manage, and/or prevent breast cancer binds to transcription factors selected from the group consisting of TCF7L1, GTF2IRD1, FOXM1, FOXC1, ZEB2, TCF4, TGIF2, LYL1, E2F3 and E2F5.

[0145] In particular embodiments, the therapeutic agent (e.g., oligonucleotide decoy, population of oligonucleotide decoys, binding agent) or composition that is administered to treat, manage, and/or prevent breast cancer binds to transcription factors selected from the group consisting of TCF7L1, GTF2IRD1, FOXM1, FOXC1, ZEB2, TCF4, TGIF2, LYL1, E2F3, E2F5, MAF, BCL11A, HOXB5 and HMGA1.

[0146] In particular embodiments, the therapeutic agent (e.g., oligonucleotide decoy, population of oligonucleotide decoys, binding agent) or composition that is administered to treat, manage, and/or prevent breast cancer binds to transcription factors selected from the group consisting of YBX1, YY1, ZEB2, FOXM1, FOXC1, MAX, XBP1, CXXC5 and NFIL3.

[0147] In particular embodiments, the therapeutic agent (e.g., oligonucleotide decoy, population of oligonucleotide decoys, binding agent) or composition that is administered to treat, manage, and/or prevent breast cancer binds to transcription factors selected from the group consisting of YBX1, YY1, ZEB2, FOXM1, FOXC1, TCF7L1, TGIF2, LYL1, GTF2IRD1, E2F3 and E2F5.

[0148] Also included are methods for modulating transcription of a gene present in a cell involved in breast cancer signaling in a subject, comprising administering to the cell a therapeutically effective amount of a therapeutic agent, wherein the therapeutic agent inhibits binding of a transcription factor to its transcription factor binding site, wherein the transcription factor is selected from the group consisting of selected from the group consisting of BCL11A, CxxC domain-containing proteins (e.g., CXXC5), E2F (e.g., E2F5, E2F3), FOX (e.g., FOXC1, FOXM1), GTF2IRD1, HMGA1, HOXB5, LYL1, MAF (e.g., c-MAF, MAF-k), MAX, MYC, NFIL3, TCF (e.g., TCF3, TCF4, TCF7L1), TGIF2, XBP1, YBX1, YY1, ZEB2 and closely related factors.

[0149] In some embodiments, the therapeutic agent includes one or more oligonucleotide decoys described herein. In certain embodiments, modulation of transcription comprises suppressing or repressing gene expression. In some embodiments, modulation of transcription comprises stabilizing gene expression. In particular embodiments, modulation of transcription comprises activating or inducing gene expression. In certain embodiments, the gene is involved in breast cancer signaling. Genes involved in breast cancer signaling, but are not limited to, genes encoding DNA repair protein (e.g. nucleases), protein regulating gene expression (e.g., transcription factors, methylase), membrane proteins (e.g., ion channels, membrane receptors, etc.), soluble signaling molecules (e.g., intracellular signaling molecules or neurotransmitters), synthetic enzymes (e.g., neurotransmitter synthesis enzymes), and transcription factors.

[0150] Some embodiments include methods for modulating breast cancer signaling in a cell, comprising administering to the cell a therapeutically effective amount of a therapeutic agent, wherein the therapeutic agent inhibits binding of a transcription factor to its transcription factor binding site, wherein the transcription factor is selected from the group BCL11A, CxxC domain-containing proteins (e.g., CXXC5), E2F (e.g., E2F5, E2F3), FOX (e.g., FOXC1, FOXM1), GTF2IRD1, HMGA1, HOXB5, LYL1, MAF (e.g., c-MAF, MAF-k), MAX, MYC, NFIL3, TCF (e.g., TCF3, TCF4, TCF7L1), TGIF2, XBP1, YBX1, YY1, ZEB2 and closely related factors. In some embodiments, the therapeutic agent includes one or more oligonucleotide decoys described herein. In certain embodiments, modulation of breast cancer signaling comprises suppressing or repressing breast cancer signaling. In some embodiments, modulation of breast cancer signaling comprises activation of an inhibitor of breast cancer signaling. In particular embodiments, modulation of breast cancer signaling comprises altering transcription factor networks.

[0151] In certain embodiments, the cell of the various methods is provided in vivo (e.g., in a subject suffering from breast cancer or likely to suffer from breast cancer). A cell provided in vivo can be located in different locations including breast but in a metastasis in another tissue, including but not limited to the skin, bones, lung or the brain. In other embodiments, the cell of the various methods is provided in vitro (e.g., in a petri dish). The cell can be any cell involved in breast cancer signaling, including, but not limited to, an epithelial cell, an endothelial cell, a duct cell or a stem cell (e.g., cancer stem cell), a tissue supportive cell (e.g., fibroblast), an immune cell, or a cell from a cell line (e.g., an MDA-MB-231 cell).

[0152] In some embodiments, the oligonucleotide decoys and/or pharmaceutical compositions thereof are used in combination therapy with at least one other therapeutic agent. Examples of other therapeutic agents include but are not limited to one or more additional oligonucleotide decoys or chemotherapy or immunotherapy. The oligonucleotide decoy and/or pharmaceutical composition thereof and the therapeutic agent can act additively or, more preferably, synergistically. In some embodiments, an oligonucleotide decoy and/or a pharmaceutical composition thereof is administered concurrently with the administration of another therapeutic agent, including another oligonucleotide decoy. In other embodiments, an oligonucleotide decoy or a pharmaceutical composition thereof is administered prior or subsequent to administration of another therapeutic agent, including another oligonucleotide decoy.

[0153] For administration to a subject in need thereof, the oligonucleotide decoys and/or pharmaceutical compositions described herein may be administered by any convenient route. Particular examples include administration by infusion or bolus injection in the tumor or intravenously, by absorption through epithelial or mucocutaneous linings (e.g., oral mucosa, rectal and intestinal mucosa, etc.), and by oral administration. Administration can be systemic or local. Various delivery systems are known in the art, including, e.g., encapsulation in liposomes, microparticles, microcapsules, capsules, etc., which can be used to administer a compound and/or pharmaceutical composition thereof. Methods of administration include, but are not limited to, intradermal, intramuscular, intraperitoneal, intravenous, subcutaneous, intranasal, epidural/peridural, oral, sublingual, intranasal, intracerebral, intravaginal, transdermal, rectally, by inhalation or topically, particularly to the ears, nose, eyes, or skin. In certain embodiments, the oligonucleotide decoy is administered perineurally, epidurally/peridurally, intrathecally, or intradermally. In certain embodiments, more than one oligonucleotide decoy is administered to a patient. The preferred mode of administration is left to the discretion of the practitioner, and will depend in-part upon the site of the medical condition.

[0154] In specific embodiments, it may be desirable to administer one or more oligonucleotide decoys locally to the area in need of treatment. This may be achieved, for example, and not by way of limitation, by local infusion during surgery, topical application (e.g., in conjunction with a wound dressing after surgery), by injection, by means of a catheter, by means of a suppository, or by means of an implant, said implant being of a porous, non-porous, or gelatinous material, including membranes, such as sialastic membranes, or fibers. In some embodiments, administration can be by direct injection at the site (e.g., former, current, or expected site) of breast cancer or of a metastasis.

[0155] In certain embodiments, it may be desirable to introduce one or more oligonucleotide decoys into the nervous system by any suitable route, including but not restricted to intraventricular, intrathecal, perineural and/or epidural/peridural injection Intraventricular injection may be facilitated by an intraventricular catheter, for example, attached to a reservoir, such as an Ommaya reservoir.

[0156] Pulmonary administration can also be employed, e.g., by use of an inhaler or nebulizer, and formulation with an aerosolizing agent, or via perfusion in a fluorocarbon or synthetic pulmonary surfactant.

[0157] The amount of oligonucleotide decoy that will be effective in the treatment or prevention of breast in a patient will depend on the specific nature of the condition and can be determined by standard clinical techniques known in the art. In addition, in vitro or in vivo assays may optionally be employed to help identify optimal dosage ranges. The amount of an oligonucleotide decoy administered will, of course, be dependent on, among other factors, the subject being treated, the weight of the subject, the severity of the affliction, the manner of administration, and the judgment of the prescribing physician. In certain embodiments, a single dose of oligonucleotide decoy may comprise, but is not limited to, about 0.1 μg to 10,000 mg, 5 μg to about 1000 mg, about 50 μg to about 500 mg, about 100 μg to about 100 mg of oligonucleotide decoy per kilogram (kg) of body weight or per tumor mm² (i.e., size) or cm³ (i.e., volume). Frequency of administration can be once or multiple time daily, weekly, monthly or annually or any combination of those.

[0158] In some embodiments, the dosage forms are adapted to be administered to a patient as needed daily, once or more weekly, once or more monthly or once or more annually. Dosing may be provided alone or in combination with other drugs and may continue as long as required for effective treatment or prevention of breast cancer.

### Compositions and Kits

[0159] Certain embodiments include compositions, for example, pharmaceutical or therapeutic compositions, comprising one or more therapeutic agents (e.g., oligonucleotide decoys, binding agents) described herein, optionally in combination with one or more pharmaceutically-acceptable carriers (e.g., pharmaceutical-grade carriers).

[0160] The pharmaceutical compositions disclosed herein comprise a therapeutically effective amount of one or more therapeutic agents (e.g., oligonucleotide decoys), preferably, in purified form, together with a suitable amount of a pharmaceutically-acceptable carrier, so as to provide a form for proper administration to a patient. When administered to a patient, therapeutic agents such as oligonucleotide decoys and pharmaceutically-acceptable carriers are preferably sterile. Examples of pharmaceutically-acceptable carriers include, but are not limited to, saline, phosphate buffered saline (PBS), tris buffer, water, aqueous ethanol, emulsions, such as oil/water emulsions or triglyceride emulsions, tablets and capsules. Water is a preferred vehicle when oligonucleotide decoys are administered intravenously. Saline solutions and aqueous dextrose and glycerol solutions can also be employed as liquid vehicles, particularly for injectable solutions. Suitable pharmaceutically-acceptable carriers also include excipients such as starch, glucose, lactose, sucrose, gelatin, malt, rice, flour, chalk, silica gel, sodium stearate, glycerol monostearate, talc, sodium chloride, dried skim milk, glycerol, propylene, glycol, water, ethanol and the like. Pharmaceutical compositions, if desired, can also contain minor amounts of wetting or emulsifying agents, or pH buffering agents. In addition, auxiliary, stabilizing, thickening, lubricating and coloring agents may be used.

[0161] Pharmaceutical compositions may be manufactured by means of conventional mixing, dissolving, granulating, dragee-making, levigating, emulsifying, encapsulating, entrapping or lyophilizing processes. Pharmaceutical compositions may be formulated in conventional manner using one or more physiologically acceptable carriers, diluents, excipients or auxiliaries, which facilitate processing of compounds disclosed herein into preparations which can be used pharmaceutically. Proper formulation is dependent upon the route of administration chosen.

[0162] Pharmaceutical compositions can take the form of solutions, suspensions, emulsions, tablets, pills, pellets, capsules, capsules containing liquids, powders, sustained-release formulations, suppositories, aerosols, sprays, suspensions, or any other form suitable for use. Other examples of suitable pharmaceutical vehicles have been described in the art (see Remington's Pharmaceutical Sciences, Philadelphia College of Pharmacy and Science, 19th Edition, 1995, which is hereby incorporated by reference in its entirety).

[0163] Pharmaceutical compositions for oral delivery may be in the form of tablets, lozenges, aqueous or oily suspensions, granules, powders, emulsions, capsules, syrups, or elixirs, for example. Orally administered compositions may contain one or more optional agents, for example, sweetening agents such as fructose, aspartame or saccharin, flavoring agents such as peppermint, oil of wintergreen, or cherry coloring agents and preserving agents, to provide a pharmaceutically palatable preparation. Moreover, when in tablet or pill form, the compositions may be coated to delay disintegration and absorption in the gastrointestinal tract, thereby providing a sustained action over an extended period of time. Oral compositions can include standard vehicles such as mannitol, lactose, starch, magnesium stearate, sodium saccharine, cellulose, magnesium carbonate, etc. Such vehicles are preferably of pharmaceutical grade.

[0164] For oral liquid preparations such as, for example, suspensions, elixirs and solutions, suitable carriers, excipients or diluents include water, saline, alkyleneglycols (e.g., propylene glycol), polyalkylene glycols (e.g., polyethylene glycol), oils, alcohols, slightly acidic buffers between pH 4 and pH 6 (e.g., acetate, citrate, or ascorbate at between about 5 mM to about 50 mM), etc. Additionally, flavoring agents, preservatives, coloring agents, bile salts, acylcarnitines and the like may be added.

[0165] For buccal administration, the compositions may take the form of tablets, lozenges, etc., formulated in conventional manner. Liquid drug formulations suitable for use with nebulizers and liquid spray devices and EHD aerosol devices will typically include a compound with a pharmaceutically acceptable vehicle. In some aspects, the pharmaceutically acceptable vehicle is a liquid such as alcohol, water, polyethylene glycol or a perfluorocarbon. Optionally, another material may be added to alter the aerosol properties of the solution or suspension of compounds. In some aspects, the material is liquid such as an alcohol, glycol, polyglycol or a fatty acid. Other methods of formulating liquid drug solutions or suspension suitable for use in aerosol devices are known to those of skill in the art (see, e.g., Biesalski, U.S. Pat. No. 5,112,598; Biesalski, U.S. Pat. No. 5,556,611, which are hereby incorporated by reference in their entireties). A compound may also be formulated in rectal or vaginal compositions such as suppositories or retention enemas, e.g., containing conventional suppository bases such as cocoa butter or other glycerides. In addition to the formulations described previously, a compound may also be formulated as a depot preparation. Such long-acting formulations may be administered by implantation (for example, subcutaneously or intramuscularly) or by intramuscular injection. Thus, for example, a compound may be formulated with suitable polymeric or hydrophobic materials (for example, as an emulsion in an acceptable oil) or ion exchange resins, or as sparingly soluble derivatives, for example, as a sparingly soluble salt.

[0166] An oligonucleotide decoy may be included in any of the herein-described formulations, or in any other suitable formulation, as a pharmaceutically acceptable salt, a solvate or hydrate. Pharmaceutically acceptable salts substantially retain the activity of the parent compound and may be prepared by reaction with appropriate bases or acids and tend to be more soluble in aqueous and other protic solvents than the corresponding parent form.

[0167] In some instances, liposomes may be employed to facilitate uptake of the oligonucleotide decoys into cells, for example, in vitro or in a subject (see, e.g., Williams, S. A., Leukemia 10(12):1980-1989, 1996; Lappalainen et al., Antiviral Res. 23:119, 1994; Uhlmann et al., Chemical Reviews, Volume 90, No. 4, 25 pages 544-584, 1990; Gregoriadis, G., Chapter 14, Liposomes, Drug Carriers in Biology and Medicine, pp. 287-341, Academic Press, 1979, which are hereby incorporated by reference in their entireties). Hydrogels may also be used as vehicles for oligonucleotide decoy administration, for example, as described in WO 93/01286. Alternatively, the oligonucleotide decoys may be administered in microspheres or microparticles. (See, e.g., Wu, G. Y. and Wu, C. H., J. Biol. Chem. 262:4429-4432, 30 1987, which are hereby incorporated by reference in their entireties). Alternatively, the use of gas-filled microbubbles complexed with the oligonucleotide decoys can enhance delivery to target tissues, as described in U.S. Pat. No. 6,245,747, which is hereby incorporated by reference in its entirety. Sustained release compositions may also be used. These may include semipermeable polymeric matrices in the form of shaped articles such as films or microcapsules.

[0168] Oligonucleotide decoys can be introduced into cells using art-recognized techniques (e.g., transfection, electroporation, fusion, liposomes, colloidal polymeric particles and viral and non-viral vectors as well as other means known in the art). The method of delivery selected will depend at least on the oligonucleotide chemistry, the cells to be treated and the location of the cells and will be apparent to the skilled artisan. For instance, localization can be achieved by liposomes with specific markers on the surface to direct the liposome, direct injection into tissue containing target cells, specific receptor-mediated uptake, or the like.

[0169] As known in the art, oligonucleotide decoys may be delivered using, e.g., methods involving liposome-mediated uptake, lipid conjugates, polylysine-mediated uptake, nanoparticle-mediated uptake, and receptor-mediated endocytosis, as well as additional non-endocytic modes of delivery, such as microinjection, permeabilization (e.g., streptolysin-O permeabilization, anionic peptide permeabilization), electroporation, and various non-invasive non-endocytic methods of delivery that are known in the art (e. g., Dokka and Rojanasakul, Advanced Drug Delivery Reviews 44:35-49, incorporated by reference in its entirety).

[0170] In certain embodiments, one or more oligonucleotide decoys are provided in a kit. In certain embodiments, the kit includes an instruction, e.g., for using said one or more oligonucleotide decoys. In certain embodiments, said instruction describes one or more of the methods of the present invention, e.g., a method for preventing or treating breast cancer, a method of modulating gene expression in a cell, a method for modulating breast cancer signaling in a cell, a method for altering transcription factor networks in a cell, etc. In certain embodiments, the oligonucleotide decoys provided in a kit are provided in lyophilized form. In certain related embodiments, a kit that comprises one or more lyophilized oligonucleotide decoys further comprises a solution (e.g., a pharmaceutically-acceptable saline solution) that can be used to resuspend one or more of the oligonucleotide decoys.

### Embodiments

[0171] 1. An oligonucleotide decoy, comprising: a combination of at least two transcription factor binding sites, wherein each transcription factor binding site binds to a transcription factor selected from the group consisting of: BCL11A, CxxC domain-containing proteins (e.g., CXXC5), E2F (e.g., E2F5, E2F3), FOX (e.g., FOXC1, FOXM1), GTF2IRD1, HMGA1, HOXB5, LYL1, MAF (e.g., c-MAF, MAF-k), MAX, MYC, NFIL3, TCF (e.g., TCF3, TCF4, TCF7L1), TGIF2, XBP1, YBX1, YY1, ZEB2 and closely related factors.
[0172] 2. The oligonucleotide decoy of embodiment 1, wherein the oligonucleotide decoy is about 10 to about 100 base pairs in length.
[0173] 3. The oligonucleotide decoy of embodiment 1, wherein the oligonucleotide decoy can bind from 2 transcription factors up to 30 or 40 or a higher number of transcription factors.
[0174] 4. The oligonucleotide decoy of embodiment 1, wherein the oligonucleotide decoy comprises a first transcription factor binding site and a second transcription factor binding site, and wherein the first and the second transcription binding sites overlap.
[0175] 5. The oligonucleotide decoy of embodiment 1, wherein the oligonucleotide decoy has a first transcription factor binding site, a second transcription factor binding site, and a third transcription factor binding site, and wherein the first, second, and third transcription factor binding sites overlap.
[0176] 6. The oligonucleotide decoy of embodiment 1, wherein the oligonucleotide decoy has a first transcription factor binding site, a second transcription factor binding site, a third transcription factor binding site, and up to 30 or 40 or a higher number of transcription factor binding sites that can overlap.
[0177] 7. The oligonucleotide decoy of embodiment 1, wherein the oligonucleotide decoy has transcription factor binding sites that do not overlap.
[0178] 8. The oligonucleotide decoy of embodiment 1, which is any of the population of sequences that are 12 nucleotide long: SEQ ID NO: 1 to SEQ ID NO: 48.
[0179] 9. The oligonucleotide decoy of embodiment 1, which is any of the population of sequences that are 17 nucleotide long: SEQ ID v: 49 to SEQ ID NO: 64.
[0180] 10. The oligonucleotide decoy of embodiment 1, which is any of the population of sequences that are 18 nucleotide long: SEQ ID NO: 3761 to SEQ ID NO: 3836.
[0181] 11. The oligonucleotide decoy of embodiment 1, which is any of the population of sequences that are 29 nucleotide long: SEQ ID NO: 3837 to SEQ ID NO: 3868.
[0182] 12. The oligonucleotide decoy of embodiment 1, which is any of the population of sequences that are 41 nucleotide long: SEQ ID NO: 65 to SEQ ID NO: 176 and SEQ ID NO: 4593.
[0183] 13. The oligonucleotide decoy of embodiment 1, which is any of the population of sequences that are 44 nucleotide long: SEQ ID NO: 177 to SEQ ID NO: 3760.
[0184] 14. The oligonucleotide decoy of embodiment 1, which is any of the population of sequences that are 57 nucleotide long: SEQ ID NO: 3869 to SEQ ID NO: 4540.
[0185] 15. The oligonucleotide decoy of embodiment 1, which is any of the population of possible sequences from the list of SEQ ID NO: 1 to SEQ ID NO: 48 that can bind to TCF7L1 and GTF2IRD1.
[0186] 16. The oligonucleotide decoy of embodiment 1, which is any of the population of possible sequences from the list SEQ ID NO: 49 to SEQ ID NO: 64 that can bind to FOXC1, FOXM1, GTF2IRD1 and TCF7L1.
[0187] 17. The oligonucleotide decoy of embodiment 1, which is any of the population of possible sequences from the list SEQ ID NO: 65 to SEQ ID NO: 176, and SEQ ID NO: 4593 that can bind to E2F3, E2F5, FOXC1, FOXM1, GTF2IRD1, LYL1, TCF4, TCF7L1, TGIF2 and ZEB2.
[0188] 18. The oligonucleotide decoy of embodiment 1, which is any of the population of possible sequences from the list SEQ ID NO: 177 to SEQ ID NO: 3760 that can bind to CXXC5, FOXC1, FOXM1, MAX, NFIL3, TCF4, XBP1, YBX1, YY1, ZEB2.
[0189] 19. The oligonucleotide decoy of embodiment 1, which is any of the population of possible sequences from the list SEQ ID NO: 3761 to SEQ ID NO: 3868 that can bind to BCL11A, HMGA1, HOXB5 and MAF.
[0190] 20. The oligonucleotide decoy of embodiment 1, which is any of the population of possible sequences from the list SEQ ID NO: 3869 to SEQ ID NO: 4540 that can bind to BCL11A, E2F3, E2F5, FOXC1, FOXM1, GTF2IRD1, HMGA1, HOXB5, LYL1, MAF, TCF4, TCF7L1, TGIF2 and ZEB2.
[0191] 21. The oligonucleotide decoy of embodiment 1, which is any of the population of possible sequences that can bind to any combination of transcription factor from the from the group consisting of BCL11A, CxxC domain-containing proteins (e.g., CXXC5), E2F (e.g., E2F5, E2F3), FOX (e.g., FOXC1, FOXM1), GTF2IRD1, HMGA1, HOXB5, LYL1, MAF (e.g., c-MAF, MAF-k), MAX, MYC, NFIL3, TCF (e.g., TCF3, TCF4, TCF7L1), TGIF2, XBP1, YBX1, YY1, ZEB2 and closely related factors.
[0192] 22. The oligonucleotide decoy of embodiment 1, wherein the oligonucleotide decoy comprises a nucleotide sequence of SEQ ID NO: 88, SEQ ID NO: 4593, SEQ ID NO: 4594, SEQ ID NO: 4595, SEQ ID NO: 4596, SEQ ID NO:4547, or SEQ ID NO: 4598.
[0193] 23. The oligonucleotide decoy of embodiment 1, wherein the oligonucleotide decoy has a nucleotide sequence that is at least 80%, at least 90%, or at least 95% identical to a nucleotide sequence of SEQ ID NO: 88, SEQ ID NO: 4593, SEQ ID NO: 4594, SEQ ID NO: 4595, SEQ ID NO: 4596, SEQ ID NO:4547, or SEQ ID NO: 4598.
[0194] 24. The oligonucleotide decoy of any one of embodiments 1-23, wherein the oligonucleotide decoy is a double-stranded nucleic acid.
[0195] 25. A pharmaceutical composition, comprising: an oligonucleotide decoy or population of oligonucleotide decoy of any one of embodiments 1-24, and a pharmaceutically acceptable carrier.
[0196] 26. A kit, comprising: an oligonucleotide decoy or population of oligonucleotide decoys of any one of embodiments 1-24, and optionally an instruction for using said oligonucleotide decoy.
[0197] 27. A method for modulating transcription of a gene present in a cell involved in breast cancer signaling, comprising: administering to the cell an effective amount of an oligonucleotide decoy or population of oligonucleotide decoy of any one of embodiments 1-24.
[0198] 28. A method for modulating breast cancer signaling in a cell, comprising: administering to the cell an effective amount of an oligonucleotide decoy or population of oligonucleotide decoy of any one of embodiments 1-24.
[0199] 29. A method for treating breast cancer in a subject in need thereof, comprising: administering to the subject a therapeutically effective amount of an oligonucleotide decoy or population of oligonucleotide decoy of any one of embodiments 1-23.
[0200] 30. The method of any one of embodiments 27 to 29, wherein the breast cancer is a triple negative breast cancer.
[0201] 31. The method of any one of embodiments 27 to 29, wherein the breast cancer is an ER+ or PR+ breast cancer.
[0202] 32. The method of any one of embodiments 27 to 29, wherein the breast cancer is an HER2+ breast cancer.
[0203] 33. The method of any one of embodiments 27 to 29, wherein the breast cancer is any form of breast cancer.
[0204] 34. A method for modulating breast cancer signaling in a cell, comprising: administering to the cell a therapeutically effective amount of a therapeutic agent, wherein the therapeutic agent inhibits binding of a transcription factor to its transcription factor binding site, wherein the transcription factor is selected from the group consisting of BCL11A, CxxC domain-containing proteins (e.g., CXXC5), E2F (e.g., E2F5, E2F3), FOX (e.g. FOXC1, FOXM1), GTF2IRD1, HMGA1, HOXB5, LYL1, MAF (e.g. c-MAF, MAF-k), MAX, MYC, NFIL3, TCF (e.g., TCF3, TCF4, TCF7L1), TGIF2, XBP1, YBX1, YY1, ZEB2 and closely related factors.
[0205] 35. A method for treating breast cancer in a subject in need thereof, comprising: administering to the subject a therapeutically effective amount of a therapeutic agent, wherein the therapeutic agent inhibits binding of a transcription factor to its transcription binding site, wherein the transcription factor is selected from the group consisting of BCL11A, CxxC domain-containing proteins (e.g., CXXC5), E2F (e.g., E2F5, E2F3), FOX (e.g. FOXC1, FOXM1), GTF2IRD1, HMGA1, HOXB5, LYL1, MAF (e.g. c-MAF, MAF-k), MAX, MYC. NFIL3, TCF (e.g., TCF3, TCF4, TCF7L1), TGIF2, XBP1, YBX1, YY1, ZEB2 and closely related factors.

### EXAMPLES

### Experimental Protocol and SEQ ID NOS

[0206] The invention may be further defined by reference to one or more of the following experimental protocols. It will be apparent to those skilled in the art that many modifications, both to materials and methods, may be practiced without departing from the scope of the invention.

### In Vitro Experiments

[0207] In one experiment, the effects of oligonucleotides binding to different combinations of the transcription factors from the group consisting of BCL11A, CxxC domain-containing proteins (e.g., CXXC5), E2F (e.g., E2F5, E2F3), FOX (e.g., FOXC1, FOXM1), GTF2IRD1, HMGA1, HOXB5, LYL1, MAF (e.g., c-MAF, MAF-k), MAX, MYC, NFIL3, TCF (e.g., TCF3, TCF4, TCF7L1), TGIF2, XBP1, YBX1, YY1, ZEB2 and closely related factors may be tested in cancer cell lines. The experimental cancer cell line models consist of testing the effects of oligonucleotides on fundamental properties of cancer cells in vitro: proliferation, which can impact tumor survival and growth and/or recurrence, and/or cell migration, which can impact tumor aggressiveness and/or metastatic potential.

[0208] In one instance, oligonucleotide of SEQ ID NO: 1 or SEQ ID NO: 17 or SEQ ID NO: 25 or SEQ ID NO: 33 binds to TCF7L1 and GTF2IRD1, oligonucleotide of SEQ ID NO: 49 binds to FOXC1, FOXM1, GTF2IRD1 and TCF7L1, oligonucleotide of SEQ ID NO: 65 or SEQ ID NO: 81 or SEQ ID NO: 97 or SEQ ID NO: 129 or SEQ ID NO: 161 binds to E2F3, E2F5, FOXC1, FOXM1, GTF2IRD1, LYL1, TCF4, TCF7L1, TGIF2, ZEB2.

[0209] In another instance, oligonucleotide of SEQ ID NO: 177 or SEQ ID NO: 433 or SEQ ID NO: 561 or SEQ ID NO: 817 or SEQ ID NO: 945 or SEQ ID NO: 1073 or SEQ ID NO: 1201 or SEQ ID NO: 1329 or SEQ ID NO: 1393 or SEQ ID NO: 1521 or SEQ ID NO: 1585 or SEQ ID NO: 1649 or SEQ ID NO: 1777 or SEQ ID NO: 1841 or SEQ ID NO: 1969 or SEQ ID NO: 2097 or SEQ ID NO: 2225 or SEQ ID NO: 2289 or SEQ ID NO: 2353 or SEQ ID NO: 2481 or SEQ ID NO: 2609 or SEQ ID NO: 2737 or SEQ ID NO: 2865 or SEQ ID NO: 2929 or SEQ ID NO: 2993 or SEQ ID NO: 3121 or SEQ ID NO: 3377 or SEQ ID NO: 3505 binds to CXXC5, FOXC1, FOXM1, MAX, NFIL3, TCF4, XBP1, YBX1, YY1, ZEB2.

[0210] In another instance, oligonucleotide of SEQ ID NO: 3761 or SEQ ID NO: 3785 or SEQ ID NO: 3791 or SEQ ID NO: 3795 or SEQ ID NO: 3799 or SEQ ID NO: 3805 or SEQ ID NO: 3809 or SEQ ID NO: 3813 or SEQ ID NO: 3837 or SEQ ID NO: 3853 binds to BCL11A, HMGA1, HOXB5, MAF.

[0211] In another instance, oligonucleotide of SEQ ID NO: 3869 or SEQ ID NO: 3901 or SEQ ID NO: 3965 or SEQ ID NO: 4157 binds to BCL11A, E2F3, E2F5, FOXC1, FOXM1, GTF2IRD1, HMGA1, HOXB5, LYL1, MAF, TCF4, TCF7L1, TGIF2, ZEB2.

[0212] Additional oligonucleotide sequences targeting the same combination of transcription factors or different combination of transcription factors from the group consisting of BCL11A, CxxC domain-containing proteins (e.g., CXXC5), E2F (e.g., E2F5, E2F3), FOX (e.g., FOXC1, FOXM1), GTF2IRD1, HMGA1, HOXB5, LYL1, MAF (e.g., c-MAF, MAF-k), MAX, MYC, NFIL3, TCF (e.g., TCF3, TCF4, TCF7L1), TGIF2, XBP1, YBX1, YY1, ZEB2 and closely related factors may be tested.

[0213] In one model, the effects of sequences, modified or not, targeting combinations of transcription factors from the group consisting of BCL11A, CxxC domain-containing proteins (e.g., CXXC5), E2F (e.g., E2F5, E2F3), FOX (e.g., FOXC1, FOXM1), GTF2IRD1, HMGA1, HOXB5, LYL1, MAF (e.g. c-MAF, MAF-k), MAX, MYC, NFIL3, TCF (e.g., TCF3, TCF4, TCF7L1), TGIF2, XBP1, YBX1, YY1, ZEB2 and closely related factors may be tested in the in vitro proliferation of cells from cancer cell lines representative of different types of breast cancers. Breast cancer cell lines in the model can be selected from the group consisting of, but not limited to: BT20, BT549, MDA-MB-157, MDA-MB-231, MDA-MB-436, MDA-MB-453, MDA-MB-468, MCF10A, Hs578, HBL100, SUM102, SUM149, MCF7, T47D, BT474, Hs578T, Hs587T, HCC1395, HCC1954, DT22, Dt28, MCF12A, HCC1954, T47D, HCC38, HCC38, HCC1187, HCC1150, HCC1937, HCC1954, CAMA1, ZR-75-1.

[0214] In one model, the effect of SEQ ID NOs: 1, 177, 3761 and 3869 (or related sequences), modified or not, on the in vitro proliferation of cells from cancer cell lines representative of different types of breast cancers (e.g., TBNC, ER+, HER2+) are tested. Breast cancer cell lines in the model can be selected from the group consisting of, but not limited to: BT20, BT549, MDA-MB-157, MDA-MB-231, MDA-MB-436, MDA-MB-453, MDA-MB-468, MCF10A, Hs578, HBL100, SUM102, SUM149, MCF7, T47D, BT474, Hs578T, Hs587T, HCC1395, HCC1954, DT22, Dt28, MCF12A, HCC1954, T47D, HCC38, HCC38, HCC1187, HCC1150, HCC1937, HCC1954, CAMA1, ZR-75-1.

[0215] In another model, the effect of sequences, modified or not, targeting combinations of transcription factors from the group consisting of BCL11A, CxxC domain-containing proteins (e.g., CXXC5), E2F (e.g., E2F5, E2F3), FOX (e.g., FOXC1, FOXM1), GTF2IRD1, HMGA1, HOXB5, LYL1, MAF (e.g., c-MAF, MAF-k), MAX, MYC, NFIL3, TCF (e.g., TCF3, TCF4, TCF7L1), TGIF2, XBP1, YBX1, YY1, ZEB2 and closely related factors may be tested in the in vitro migration of cells from cancer cell lines representative of different types of breast cancers. Breast cancer cell lines in the model can be selected from the group consisting of, but not limited to: BT20, BT549, MDA-MB-157, MDA-MB-231, MDA-MB-436, MDA-MB-453, MDA-MB-468, MCF10A, Hs578, HBL100, SUM102, SUM149, MCF7, T47D, BT474, Hs578T, Hs587T, HCC1395, HCC1954, DT22, Dt28, MCF12A, HCC1954, T47D, HCC38, HCC38, HCC1187, HCC1150, HCC1937, HCC1954, CAMA1, ZR-75-1.

[0216] In another model, the effect of SEQ ID NOs: 1, 177, 3761 and 3869 (or related sequences), modified or not, on the in vitro migration of cells from cancer cell lines representative of different types of breast cancers (e.g., TBNC, ER+, HER2+) are tested. Breast cancer cell lines in the model can be selected from the group consisting of, but not limited to: BT20, BT549, MDA-MB-157, MDA-MB-231, MDA-MB-436, MDA-MB-453, MDA-MB-468, MCF10A, Hs578, HBL100, SUM102, SUM149, MCF7, T47D, BT474, Hs578T, Hs587T, HCC1395, HCC1954, DT22, Dt28, MCF12A, HCC1954, T47D, HCC38, HCC38, HCC1187, HCC1150, HCC1937, HCC1954, CAMA1, ZR-75-1.

[0217] In the cell proliferation assays, cells are thawed from a frozen stock reserve, resuscitated and plated in wells 96 well plate in a standard growth media. Cells are treated with control vehicle or oligonucleotide sequences at up to 10 concentrations (e.g., 1, 10, 50, 100, 500, 1000, 2500, 5000, 10000 nM) using standard transfection method for cell lines (e.g., lipofectamine, DOTAP). The effect on treatments on cell numbers, which can increase, be stable or decrease, can be measured by a CellTiter-Glo (CTG) assay or an equivalent method at regular interval over a 5-10 day period.

[0218] In the cell migration assays, cells are thawed from a frozen stock reserve, resuscitated and plated in wells 96 well plate in a standard growth media. Cells are treated with control vehicle or oligonucleotide sequences at up to 10 concentrations (e.g., 1, 10, 50, 100, 500, 1000, 2500, 5000, 10000 nM) using standard transfection method for cell lines (e.g., lipofectamine, DOTAP). The effect on treatments on cell numbers, which can increase, be stable or decrease, can be measured by a Incucyte assay or an equivalent method at regular interval over a 5-10 day period.

### In Vivo Experiments

[0219] In one experiment, the effect of oligonucleotides binding to different combinations of the transcription factors from the group consisting of BCL11A, CxxC domain-containing proteins (e.g., CXXC5), E2F (e.g., E2F5, E2F3), FOX (e.g., FOXC1, FOXM1), GTF2IRD1, HMGA1, HOXB5, LYL1, MAF (e.g., c-MAF, MAF-k), MAX, MYC, NFIL3, TCF (e.g., TCF3, TCF4, TCF7L1), TGIF2, XBP1, YBX1, YY1, ZEB2 and closely related factors may be tested in animal model of breast cancer. The experimental xenograft models consist of implanting human cancer cells, derived from human cell lines or from patients' primary tumors, in a mouse and test the effects of oligonucleotides on the tumor in an in vivo context. Models can be orthotopic when the cells are implanted in the breast fat pad of the animal, or heterotopic when implanted in another place, such as subcutaneously.

[0220] One model can include cell line derived xenografts from the cell lines tested in vitro listed above such as, but not limited to, MDA-MB-231 representing various breast cancer types and genetic and mutation backgrounds, including but not limited to triple negative triple negative, ER+ or HER2+ breast cancer cells.

[0221] Other models can include patient derived xenografts of the different types of breast cancers, including but not limited to triple negative, ER+ or HER2+ breast cancer. Oligonucleotides can be administered intravenously or directly in the tumor (intra-tumor) at different time point of the model. Oligonucleotides can also be administered to the cancer cells prior to in vivo implantation. Oligonucleotides can be administered once or multiple times during the course of the model. Animal weight, survival or tumor growth (e.g., volume and/or size) can be measured as endpoints to measure the effects of the oligonucleotides. Additional endpoints can be used.

### Oligonucleotides Annealing

[0222] Each pair of complementary strands of the oligonucleotide, at equimolar concentration, is annealed in water or in a saline buffer, possibly tris-EDTA (TE). The standard procedure includes either annealing at room temperature and/or maintaining the solution of both strands at a high denaturizing temperature for a period of time which may vary depending on the oligonucleotide pair, followed by a slow decrease in temperature until the solution reaches a low temperature of annealing. The proper annealing of complementary strands may be verified by any suitable standard technique, including but not restricted to running samples of annealed oligonucleotides next to un-annealed ones on a non-denaturing polyacrylamide gel.

### Oligonucleotide Binding

[0223] In one experiment, the binding of the oligonucleotides to transcription factors may be measured. In one instance, a commercial ELISA assay or a tailored version may be used using biotin-oligonucleotide probes incubated with nuclear protein extracts containing target transcription factors from cancer cell lines, and/or recombinant human transcription factors.

[0224] The processing of the decoy probe-protein mix may be performed according to the ELISA kit supplier: typically, the mix is loaded on streptavidin-coated 96-well plates, and the quantity of captured transcription factor can be measured with an antibody-based colorimetric in a microplate reader (OD₄₅₀ nm) following the protocol provided by the ELISA supplier.

[0225] In another experiment, the binding of the oligonucleotides to transcription factors may be measured with a multiplex assay or mesoscale assay or an equivalent assay.

### Transcription Factor Network Reverse Engineering and Analysis

[0226] In one instance, transcription factor networks may be reverse engineered from gene expression data from samples of normal and breast cancer tissue using network inference algorithms. Transcription factor networks may be compared together and the importance of individual transcription factor in those networks quantified using network topology or centrality “metrics to support the novel therapeutic potential of the transcription factors inhibited by oligonucleotides.

### Example 1: Effect of Oligonucleotide Decoys (SEQ ID NO: 4593 and SEQ ID NO: 2225) in Breast Cancer Cell Proliferation Suppression

[0227] The oligonucleotide decoy SEQ ID NO: 4593 (modified SEQ ID NO: 88 with three 2′-methoxyethoxy bases at 5′ and 3′ ends on each strand) or SEQ ID NO: 2225 were transfected into MDA-MB-231 triple negative breast cancer cells and KPLA her2+ breast cancer cells. The average fold-change in cell confluency following treatment of the oligonucleotides was measured, as shown in FIGS. 1A-D. Cells were transfected with RNAimax (ThermoFisher) at T=0 and cell confluence was measured by Incucyte (Sartorius) every 3h up to 120h. Data was normalized on the cell confluence for each tested condition measured at T=0. *p<0.05, Student T test compared to untreated and corresponding RNAimax controls. Treatment conditions include: untreated, 0.12 uL RNAimax control, 0.5 uL RNAimax control, 50 nM of SEQ ID NO: 4593 or of SEQ ID NO: 2225, and 100 nM of SEQ ID NO. 4593 or of SEQ ID NO. 2225. As shown in FIGS. 1A and 1B, treating MDA-MB-231 triple negative breast cancer cells and KPL4 her2+ breast cancer cells with 50 nM or 100 nM of SEQ ID NO: 4593 significantly reduced the average cell confluency over time in both MDA-MB-231 and KPL4 breast cancer cells as compared to controls. As shown in FIGS. 1C and 1D, treating MDA-MB-231 triple negative breast cancer cells and KPL4 her2+ breast cancer cells with 100 nM of SEQ ID NO: 2225 significantly reduced the average cell confluency over time in both MDA-MB-231 and KPL4 breast cancer cells as compared to controls.

### Example 2: Apoptosis Induction of Oligonucleotide Decoys (SEQ ID NO: 4593 and SEQ ID NO: 2225) in Breast Cancer Cells

[0228] The effect of the oligonucleotide decoy of Example 1 (SEQ ID NO: 4593 and SEQ ID NO: 2225) on inducing MDA-MB-231 breast cancer cell apoptosis was evaluated. MDA-MB-231 breast cancer cells were transfected with RNAimax transfectant (ThermoFisher) at T=0. Apoptosis was measured using an Incucyte apparatus (Sartorius) with a substrate of caspase 3 and caspase 7 that emits a red fluorescence once catalyzed. The dye was applied 24 h after transfection. Data was normalized on cell confluence for each tested condition, n=3. *p<0.05, Student T test compared to untreated and corresponding RNAimax controls. Images of apoptotic cells labeled in red following treatment of 100 nM of SEQ ID NO: 4593 at 24, 48, 72, 96 and 120h after transfection were analyzed. As shown in FIG. 2A., both 50 nM and 100 nM of SEQ ID NO: 4593 treatment conditions significantly induced apoptosis in the breast cancer cells. As shown in FIG. 2B, both 50 nM and 100 nM of SEQ ID NO: 2225 treatment conditions significantly induced apoptosis in the breast cancer cells.

### Example 3: Dose Response of Oligonucleotide Decoy (SEQ ID NO: 4593) in Cancer Cell Proliferation Suppression

[0229] Oligonucleotide decoy SEQ ID NO: 4593 of Example 1 coupled to a green fluorophore (ALEXA488) in MDA-MB-231 cells were imaged following transfection. As shown in FIG. 3A, localization of the fluorophore-coupled oligonucleotide SEQ ID NO: 4593 in nuclei of the cells was observed. The effect of ascending doses of SEQ ID NO: 4593 on MDA-MB-231 cell proliferation was also assessed, as shown in FIG. 3B. Cells were transfected with RNAimax transfectant (ThermoFisher) at T=0. Treatment conditions included: untreated, 0.12 uL RNAimax control, 0.5 uL RNAimax control, 1 nM of SEQ ID NO: 4593, 10 nM of SEQ ID NO: 4593, 25 nM of SEQ ID NO: 4593, 50 nM of SEQ ID NO: 4593, 100 nM of SEQ ID NO: 4593, and 200 nM of SEQ ID NO: 4593. A dose response plot of SEQ ID NO: 4593 in MDA-MB-231 cells was obtained, as shown in FIG. 3C. Efficacy was measured as a reduction in cell proliferation (area-under-the-curve of confluence curves) over 4 days starting 24h following transfection compared to corresponding RNAimax controls.

### Example 4: Effect of Oligonucleotide Decoys (SEQ ID NOS: 4594, 4595, and 4596) in Breast Cancer Cell Proliferation Suppression

[0230] As shown in FIG. 4A, the effect of 200 nM oligonucleotide (SEQ ID NOs: 4594, 4595, and 4596) alone or combined (50 nM each of the sequences) in MDA-MB-231 cells was observed. SEQ ID NO: 4594 binds to FoxM1 and FoxC1 transcription factors, SEQ ID NO: 4595 binds to E2F3/E2F5, TCF7L1 and Lyl1 transcription factors, and SEQ ID NO: 4596 binds to TGIF2, GTFIRD1, ZEB2 and TCF4 transcription factors. The confluence values over time of untreated cells and the effect of RNAImax alone (0.5 uL) were used as controls. The effect of each sequence is statistically different from the effect of the combined sequences, Student T test, p<0.05. As shown in FIG. 4B, a dose response plot for SEQ ID NOs: 4594, 4595, 4596, and a combination of the sequences was obtained.

### Example 5: Effect of Oligonucleotide Decoys (SEQ ID NOS: 88, 4597, and 4598) in Breast Cancer Cell Proliferation Suppression

[0231] Cell proliferation suppression effect of SEQ ID NO: 88 and subparts of SEQ 4593 (i.e., SEQ ID NOs: 4597 and 4598) in two breast cancer cell lines, MDA-MB-231 cells and KPL4 cells, was assessed. SEQ ID NOs: 4597 and 4598 were generated from SEQ ID NO: 88, a short sequence binding to FOXM1, and a medium sequence binding to FOXM1, FOXC1, GTF2IRD1 and TCF7L1. The effect of each sequence on cell proliferation measured as confluence over time, as shown in FIGS. 5A and 5B. Cells were transfected at T=0. Data was normalized on cell confluence at T=0 for each tested condition and shown as mean±SEM. The effect of the short sequence SEQ ID NO: 4597 was statistically different from the effect of the medium sequence SEQ ID NO: 4598, and both SEQ ID NOs: 4597 and 4598 were different from the effect of the full sequence SEQ ID NO: 88. Student T test, *p<0.05, NS=not statistically significant, n=3 per condition, 100 nM for each sequence was used.

### Example 6: Stability and Efficacy of Oligonucleotide Decoys (SEQ ID NOs: 4593 and 88)

[0232] Stability of SEQ ID NOs 4593 and 88 was measured by observing the fold-change in fraction of full length of the oligonucleotides in human serum (in vitro incubation at 37° C.) over time. As shown in FIG. 6A, the 2′-methoxyethoxy-modified oligonucleotide (SEQ ID NO: 4593) exhibited more stability in serum as compared to the unmodified oligonucleotide (SEQ ID NO. 88) (half-life: ˜20 h for SEQ ID No: 88 versus ˜90 h for SEQ ID No: 4593), Student T test, *p<0.05 compared to corresponding fraction of full length of SEQ ID NO: 88. The efficacy of the unmodified and modified sequences for blocking MDA-MB-231 cell proliferation was measured as confluence over time, as shown in FIG. 6B. The cancer cell proliferation suppression effect of the modified sequence (SEQ ID NO: 4593) was higher than the effect of the unmodified sequence (SEQ ID NO: 88) at each dose level.

[0233] To study efficacy of SEQ ID NO: 88 in inducing apoptosis in breast cancer cells, images of MDA-MB-231 cells 5 days after treatment with vehicle (FIG. 7A) or SEQ ID NO: 88 (FIG. 7B) at 100 nM were obtained. 96 well plates were seeded with the same number of cells at T=0. Apoptosis was detected using a substrate of caspases 3 and 7 (sartorius) that emits a red fluorescence once catalyzed. As shown in FIGS. 7A-7B, SEQ ID NO: 88 treatment induced apoptosis in breast cancer cells.

### Example 8: Anti-Tumor Effects of Oligonucleotide Decoy (SEQ ID NO: 4593) in an MDA-MB231 (Triple Negative Breast Cancer Cells) Human Breast Adenocarcinoma Xenograft Model

[0234] Female Athymic Nude Rats (˜150 grams) were implanted subcutaneously with 1×10⁷ MDA-MB231 tumor cells in 50% Matrigel in their flanks. Study day 1 was determined when tumors reached a measurable size of ˜150 mm³ and rats were treated with the 2′-methoxyethoxy-modified oligonucleotide SEQ ID NO: 4593 and compared with untreated controls. SEQ ID NO: 4593 was intratumorally administered (ITU, 4.5 mg in a small 50 uL volume using the fan technique). Tumor growth was measured as the increase in growth in tumor volume (mm³) measured at regular intervals during the study up to Day 22. N=7-8 rats per group. *p<0.05, Student T test compared to untreated rats.

[0235] As shown in FIG. 8, SEQ ID NO: 4593 ITU treatment significantly inhibited tumor growth in rats. Animal growth rate measured by changes in body weight, clinical pathology (blood cells and serum chemistry), and histopathology of the liver and kidney indicated that SEQ ID NO: 4593 was well tolerated. When the oligonucleotide was intravenously administered, rat-specific rapid metabolism of the oligonucleotide was observed. The anti-tumor activity of SEQ ID NO: 4593 will be tested in other animal models.

### Example 9: Oligonucleotide Decoy Sequences

[0236] In the formulas and sequences described herein, “A” is an adenine nucleotide, “C” is a cytosine nucleotide, “G” is a guanine nucleotide, “T” is a thymine nucleotide, and “N” can be any nucleotide, preferably A, C, G, or T, “R” can be an A or G nucleotide, “Y” can be a C or T nucleotide, “S” can be a G or C nucleotide, “W” can be an A or T nucleotide, “K” can be a G or T nucleotide, “M” can be a A or C nucleotide, “B” can be a C or G or T nucleotide, “D” can be an A or G or T nucleotide, “H” can be an A or C or T nucleotide, “V” can be an A or C or G nucleotide. “inv” means inverted.

[0237] Although the formulas and sequences show a single strand, it should be understood that a complementary antisense strand is included as part of the structure of the oligonucleotide decoys. Some of exemplary sequences are listed below and summarized in Table A:

Formula 1:
(SEQ ID NO: 4541)
WWSAAAGATTAW
Formula 2:
(SEQ ID NO: 4542)
CTTTSWTAATCY
Formula 3:
(SEQ ID NO: 4543)
RGATTAWSAAAG
Formula 4:
(SEQ ID NO: 4544)
WTAATCTTTSWW
Formula 5:
(SEQ ID NO: 4545)
WWSAAAGTAAATAATCY
Formula 6:
(SEQ ID NO: 4546)
AACAGAAGGTAAACAAAGATTAWGGCGCCWWWTGACAGGTG
Formula 7:
(SEQ ID NO: 4547)
AACAGAAGGTAAACAAAGATTAWGGCGCCWWWTGACAGGTG
Formula 8:
(SEQ ID NO: 4548)
WWWWGGCGCCWTAATCTTTGTTTACCTTCTGTTGACAGGTG
Formula 9:
(SEQ ID NO: 4549)
CACCTGTCAACAGAAGGTAAACAAAGATTAWGGCGCCWWWW
Formula 10:
(SEQ ID NO: 4550)
CACCTGTCAWWWGGCGCCWTAATCTTTGTTTACCTTCTGTT
Formula 11:
(SEQ ID NO: 4551)
AARATGGCTCCACCTGTTTRTTTACACGTGAYRTAACANCGNTG
Formula 12:
(SEQ ID NO: 4552)
AARATGGCTCCACCTGTTTRTTTACACGTGTTAYRTCAYCGNTG
Formula 13:
(SEQ ID NO: 4553)
AARATGGCTCCACCTGTTAYRTCACGTGTAAAYAAACANCGNTG
Formula 14:
(SEQ ID NO: 4554)
AARATGGCTCCACCTGTTAYRTCAYCGNTGTTTRTTTACACGTG
Formula 15:
(SEQ ID NO: 4555)
AARATGGCTCCAYCGNTGTTTRTTTACACGTGAYRTAACACCTG
Formula 16:
(SEQ ID NO: 4556)
AARATGGCTCCAYCGNTGTTTRTTTACACGTGTTAYRTCACCTG
Formula 17:
(SEQ ID NO: 4557)
AARATGGCTCCAYCGNTGTTTRTTTACACGTGAYRTAACAGGTG
Formula 18:
(SEQ ID NO: 4558)
AARATGGCTCCAYCGRTGAYRTAACACCTGTTTRTTTACACGTG
Formula 19:
(SEQ ID NO: 4559)
AARATGGCTCCAYCGNTGTTAYRTCACCTGTTTRTTTACACGTG
Formula 20:
(SEQ ID NO: 4560)
AARATGGCTCCAYCGRTGAYRTAACAGGTGTTTRTTTACACGTG
Formula 21:
(SEQ ID NO: 4561)
AARATGGCTCCAYCGRTGAYRTAACACGTGTAAAYAAACACCTG
Formula 22:
(SEQ ID NO: 4562)
AARATGGCTCCAYCGNTGTTAYRTCACGTGTAAAYAAACACCTG
Formula 23:
(SEQ ID NO: 4563)
AARATGGCTCCAYCGRTGAYRTAACACGTGTAAAYAAACAGGTG
Formula 24:
(SEQ ID NO: 4564)
AARATGGCTCCAYCGNTGTTAYRTCACGTGTAAAYAAACAGGTG
Formula 25:
(SEQ ID NO: 4565)
CACCTGTTTRTTTACACGTGAYRTAACANCGRTGGAGCCATYTT
Formula 26:
(SEQ ID NO: 4566)
CAGGTGTTTRTTTACACGTGAYRTAACANCGRTGGAGCCATYTT
Formula 27:
(SEQ ID NO: 4567)
CACCTGTTTRTTTACACGTGTTAYRTCAYCGRTGGAGCCATYTT
Formula 28:
(SEQ ID NO: 4568)
CAGGTGTTTRTTTACACGTGTTAYRTCAYCGRTGGAGCCATYTT
Formula 29:
(SEQ ID NO: 4569)
CAGGTGAYRTAACACGTGTAAAYAAACANCGRTGGAGCCATYTT
Formula 30:
(SEQ ID NO: 4570)
CACCTGTTAYRTCACGTGTAAAYAAACANCGRTGGAGCCATYTT
Formula 31:
(SEQ ID NO: 4571)
CAGGTGTTAYRTCACGTGTAAAYAAACANCGRTGGAGCCATYTT
Formula 32:
(SEQ ID NO: 4572)
CACGTGTAAAYAAACAGGTGAYRTAACANCGRTGGAGCCATYTT
Formula 33:
(SEQ ID NO: 4573)
CACGTGTAAAYAAACACCTGTTAYRTCAYCGRTGGAGCCATYTT
Formula 34:
(SEQ ID NO: 4574)
CACGTGTAAAYAAACAGGTGTTAYRTCAYCGRTGGAGCCATYTT
Formula 35:
(SEQ ID NO: 4575)
CACGTGTAAAYAAACANCGRTGAYRTAACAGGTGGAGCCATYTT
Formula 36:
(SEQ ID NO: 4576)
CANCGNTGTTTRTTTACACGTGAYRTAACAGGTGGAGCCATYTT
Formula 37:
(SEQ ID NO: 4577)
CANCGRTGAYRTAACACGTGTAAAYAAACAGGTGGAGCCATYTT
Formula 38:
(SEQ ID NO: 4578)
CANCGNTGTTAYRTCACGTGTAAAYAAACAGGTGGAGCCATYTT
Formula 39:
(SEQ ID NO: 4579)
VGGYCATTAATWTCAGCR
Formula 40:
(SEQ ID NO: 4580)
VGGTCAGCAATTAATWTC
Formula 41:
(SEQ ID NO: 4581)
GAWATTAATGGGTCAGCR
Formula 42:
(SEQ ID NO: 4582)
GAWATTAATGRCCGCTGA
Formula 43:
(SEQ ID NO: 4583)
GAWATTAATTGCTGACCB
Formula 44:
(SEQ ID NO: 4584)
YGCTGACCCATTAATWTC
Formula 45:
(SEQ ID NO: 4585)
TCAGCGGYCATTAATWTC
Formula 46:
(SEQ ID NO: 4586)
YGCTGAWATTAATGRCCB
Formula 47:
(SEQ ID NO: 4587)
RGGAARTGAAATTAATTGCTGASTCAGCR
Formula 48:
(SEQ ID NO: 4588)
YGCTGASTCAGCAATTAATTTCAYTTCCY
Formula 49:
(SEQ ID NO: 4589)
AACAGAAGGTAAACAAAGATTAWGGCGCCWWWTGACAGGTGCTGACCCAT
TAATWTC
Formula 50:
(SEQ ID NO: 4590)
WWWWGGCGCCWTAATCTTTGTTTACCTTCTGTTGACAGGTGCTGACCCATT
AATWTC
Formula 51:
(SEQ ID NO: 4591)
AACAGAAGGTAAACAAAGATTAWGGCGCCWWWTGACAGGTGCTGAWATTA
ATGRCCB
Formula 52:
(SEQ ID NO: 4592)
WWWWGGCGCCWTAATCTTTGTTTACCTTCTGTTGACAGGTGCTGAWATTAA
TGRCCB

TABLE A

| SEQ ID NO | Sequence |
|---|---|
| 88 | AACAGAAGGT AAACAAAGAT TATGGCGCCT TTTGACAGGT G |
| 2225 | CACCTGTTTA TTTACACGTG TTACATCACC GATGGAGCCA TCTT |
| 4593 | A*A*C*AGAAGGT AAACAAAGAT TATGGCGCCT |
| | TTTGACAGG*T*G* |
| | * = 2′-methoxyethoxy |
| 4594 | GAAACAAACA AACAATCGTA AATAAACAG |
| 4595 | GATCAAAGGA ACAGATGGTT TTGGCGCCAA AAG |
| 4596 | GTTGACAGCT GTCAGGATTA ACGCACCTGC A |
| 4597 | ACAGAAGGTA AACAAA |
| 4598 | ACAGAAGGTA AACAAAGATT ATGGC |

### INCORPORATION BY REFERENCE

[0238] All references, articles, publications, patents, patent publications, and patent applications cited herein are incorporated by reference in their entireties for all purposes. However, mention of any reference, article, publication, patent, patent publication, and patent application cited herein is not, and should not be taken as, an acknowledgment or any form of suggestion that they constitute valid prior art or form part of the common general knowledge in any country in the world.

What is claimed is:

1. An oligonucleotide decoy, comprising: at least two transcription factor binding sites, wherein each transcription factor binding site binds to a transcription factor selected from the group consisting of: BCL11A, CxxC domain-containing proteins (e.g., CXXC5), E2F (e.g., E2F5, E2F3), FOX (e.g., FOXC1, FOXM1), GTF2IRD1, HMGA1, HOXB5, LYL1, MAF (e.g., c-MAF, MAF-k), MAX, MYC, NFIL3, TCF (e.g., TCF3, TCF4, TCF7L1), TGIF2, XBP1, YBX1, YY1, ZEB2 and closely related factors.

2. The oligonucleotide decoy of claim 1, wherein the oligonucleotide decoy is about 10 to about 100 base pairs in length.

3. The oligonucleotide decoy of claim 1, wherein the oligonucleotide decoy binds 2 to 40 transcription factors.

4. The oligonucleotide decoy of claim 1, wherein the oligonucleotide decoy comprises a first transcription factor binding site and a second transcription factor binding site, and wherein the first and the second transcription binding sites overlap.

5. The oligonucleotide decoy of claim 4, wherein the oligonucleotide decoy further comprises a third transcription factor binding site, wherein the first, second, and third transcription factor binding sites overlap.

6. The oligonucleotide decoy of claim 1, wherein the oligonucleotide decoy comprises 3-40 transcription factor binding sites that overlap.

7. The oligonucleotide decoy of claim 1, wherein the oligonucleotide decoy comprises transcription factor binding sites that do not overlap.

8. The oligonucleotide decoy of claim 1, wherein the oligonucleotide decoy is 12, 17, 18, 29, 41, 44, or 57-nucleotide long.

9. The oligonucleotide decoy of claim 1, comprising a nucleotide sequence that is at least 80%, at least 85%, at least 90%, at least 95%, or 100% identical to a sequence selected from the group consisting of SEQ ID NO: 1 to SEQ ID NO: 48.

10. The oligonucleotide decoy of claim 9, wherein the oligonucleotide decoy binds to one or more transcription factors selected from the group consisting of: TCF7L1 and GTF2IRD1.

11. The oligonucleotide decoy of claim 1, comprising a nucleotide sequence that is at least 80%, at least 85%, at least 90%, at least 95%, or 100% identical to a sequence selected from the group consisting of SEQ ID NO: 49 to SEQ ID NO: 64.

12. The oligonucleotide decoy of claim 11, wherein the oligonucleotide decoy binds to one or more transcription factors selected from the group consisting of: FOXC1, FOXM1, GTF2IRD1, and TCF7L1.

13. The oligonucleotide decoy of claim 1, comprising a nucleotide sequence that is at least 80%, at least 85%, at least 90%, at least 95%, or 100% identical to a sequence selected from the group consisting of SEQ ID NO: 3761 to SEQ ID NO: 3836.

14. The oligonucleotide decoy of claim 13, wherein the oligonucleotide decoy binds to one or more transcription factors selected from the group consisting of: BCL11A, HMGA1, HOXB5, and MAF.

15. The oligonucleotide decoy of claim 1, comprising a nucleotide sequence that is at least 80%, at least 85%, at least 90%, at least 95%, or 100% identical to a sequence selected from the group consisting of SEQ ID NO: 3837 to SEQ ID NO: 3868.

16. The oligonucleotide decoy of claim 15, wherein the oligonucleotide decoy binds to one or more transcription factors selected from the group consisting of: BCL11A, HMGA1, HOXB5, and MAF.

17. The oligonucleotide decoy of claim 1, comprising a nucleotide sequence that is at least 80%, at least 85%, at least 90%, at least 95%, or 100% identical to a sequence selected from the group consisting of SEQ ID NO: 65 to SEQ ID NO: 176, and SEQ ID NO: 4593.

18. The oligonucleotide decoy of claim 17, wherein the oligonucleotide decoy binds to one or more transcription factors selected from the group consisting of: E2F3, E2F5, FOXC1, FOXM1, GTF2IRD1, LYL1, TCF4, TCF7L1, TGIF2, and ZEB2.

19. The oligonucleotide decoy of claim 1, comprising a nucleotide sequence that is at least 80%, at least 85%, at least 90%, at least 95%, or 100% identical to a sequence selected from the group consisting of SEQ ID NO: 177 to SEQ ID NO: 3760.

20. The oligonucleotide decoy of claim 19, wherein the oligonucleotide decoy binds to one or more transcription factors selected from the group consisting of: CXXC5, FOXC1, FOXM1, MAX, NFIL3, TCF4, XBP1, YBX1, YY1, and ZEB2.

21. The oligonucleotide decoy of claim 1, comprising a nucleotide sequence that is at least 80%, at least 85%, at least 90%, at least 95%, or 100% identical to a sequence selected from the group consisting of SEQ ID NO: 3869 to SEQ ID NO: 4540.

22. The oligonucleotide decoy of claim 21, wherein the oligonucleotide decoy binds to one or more transcription factors selected from the group consisting of: BCL11A, E2F3, E2F5, FOXC1, FOXM1, GTF2IRD1, HMGA1, HOXB5, LYL1, MAF, TCF4, TCF7L1, TGIF2, and ZEB2.

23. The oligonucleotide decoy of claim 1, wherein the oligonucleotide decoy binds to one or more transcription factors selected from the group consisting of: BCL11A, CxxC domain-containing proteins (e.g., CXXC5), E2F (e.g., E2F5, E2F3), FOX (e.g., FOXC1, FOXM1), GTF2IRD1, HMGA1, HOXB5, LYL1, MAF (e.g., c-MAF, MAF-k), MAX, MYC, NFIL3, TCF (e.g., TCF3, TCF4, TCF7L1), TGIF2, XBP1, YBX1, YY1, ZEB2 and closely related factors.

24. The oligonucleotide decoy of claim 1, comprising a nucleotide sequence that is at least 80%, at least 85%, at least 90%, at least 95%, or 100% identical to a sequence selected from the group consisting of SEQ ID NO: 88, SEQ ID NO: 2225, SEQ ID NO: 4593, SEQ ID NO: 4594, SEQ ID NO: 4595, SEQ ID NO: 4596, SEQ ID NO:4547, and SEQ ID NO: 4598.

25. The oligonucleotide decoy of claim 1, comprising a nucleotide sequence that is at least 80%, at least 85%, at least 90%, at least 95%, or 100% identical to a sequence selected from the group consisting of SEQ ID NO: 88, SEQ ID NO: 4593, SEQ ID NO: 4594, SEQ ID NO: 4595, SEQ ID NO: 4596, SEQ ID NO:4547, and SEQ ID NO: 4598.

26. The oligonucleotide decoy of any one of claims 1-25, wherein the oligonucleotide decoy is a double-stranded nucleic acid.

27. A pharmaceutical composition, comprising:
an oligonucleotide decoy or population of oligonucleotide decoy of any one of claims 1-26, and
a pharmaceutically acceptable carrier.

28. A kit, comprising:
an oligonucleotide decoy or population of oligonucleotide decoys of any one of claims 1-26, and
optionally an instruction for using said oligonucleotide decoy.

29. A method for modulating transcription of a gene present in a cell involved in breast cancer signaling, comprising:
administering to the cell an effective amount of an oligonucleotide decoy of any one of claims 1-26.

30. A method for modulating breast cancer signaling in a cell, comprising:
administering to the cell an effective amount of an oligonucleotide decoy of any one of claims 1-26.

31. A method for treating breast cancer in a subject in need thereof, comprising:
administering to the subject a therapeutically effective amount of an oligonucleotide decoy of any one of claims 1-26.

32. The method of any one of claims 29 to 31, wherein the breast cancer is a triple negative breast cancer.

33. The method of any one of claims 29 to 31, wherein the breast cancer is an ER+ or PR+ breast cancer.

34. The method of any one of claims 29 to 31, wherein the breast cancer is an HER2+ breast cancer.

35. A method for modulating breast cancer signaling in a cell, comprising:
administering to the cell a therapeutically effective amount of a therapeutic agent, wherein the therapeutic agent inhibits binding of a transcription factor to its transcription factor binding site, wherein the transcription factor is selected from the group consisting of BCL11A, CxxC domain-containing proteins (e.g., CXXC5), E2F (e.g., E2F5, E2F3), FOX (e.g. FOXC1, FOXM1), GTF2IRD1, HMGA1, HOXB5, LYL1, MAF (e.g. c-MAF, MAF-k), MAX, MYC, NFIL3, TCF (e.g., TCF3, TCF4, TCF7L1), TGIF2, XBP1, YBX1, YY1, ZEB2 and closely related factors.

36. A method for treating breast cancer in a subject in need thereof, comprising:
administering to the subject a therapeutically effective amount of a therapeutic agent, wherein the therapeutic agent inhibits binding of a transcription factor to its transcription binding site, wherein the transcription factor is selected from the group consisting of BCL11A, CxxC domain-containing proteins (e.g., CXXC5), E2F (e.g., E2F5, E2F3), FOX (e.g. FOXC1, FOXM1), GTF2IRD1, HMGA1, HOXB5, LYL1, MAF (e.g. c-MAF, MAF-k), MAX, MYC, NFIL3, TCF (e.g., TCF3, TCF4, TCF7L1), TGIF2, XBP1, YBX1, YY1, ZEB2 and closely related factors.

The application's sequence listing, which the Patent Office published only in electronic form, follows.

SEQUENCE LISTING (4598 sequences)

SEQ ID NO: 1 - DNA, 12 bp, synthetic construct
  misc_feature 1..12: note = oligonucleotide decoy
  source 1..12: mol_type = other DNA
aacaaagattaa

SEQ ID NO: 2 - DNA, 12 bp, synthetic construct
  misc_feature 1..12: note = oligonucleotide decoy
  source 1..12: mol_type = other DNA
aacaaagattat

SEQ ID NO: 3 - DNA, 12 bp, synthetic construct
  misc_feature 1..12: note = oligonucleotide decoy
  source 1..12: mol_type = other DNA
aagaaagattaa

SEQ ID NO: 4 - DNA, 12 bp, synthetic construct
  misc_feature 1..12: note = oligonucleotide decoy
  source 1..12: mol_type = other DNA
aagaaagattat

SEQ ID NO: 5 - DNA, 12 bp, synthetic construct
  misc_feature 1..12: note = oligonucleotide decoy
  source 1..12: mol_type = other DNA
atcaaagattaa

SEQ ID NO: 6 - DNA, 12 bp, synthetic construct
  misc_feature 1..12: note = oligonucleotide decoy
  source 1..12: mol_type = other DNA
atcaaagattat

SEQ ID NO: 7 - DNA, 12 bp, synthetic construct
  misc_feature 1..12: note = oligonucleotide decoy
  source 1..12: mol_type = other DNA
atgaaagattaa

SEQ ID NO: 8 - DNA, 12 bp, synthetic construct
  misc_feature 1..12: note = oligonucleotide decoy
  source 1..12: mol_type = other DNA
atgaaagattat

SEQ ID NO: 9 - DNA, 12 bp, synthetic construct
  misc_feature 1..12: note = oligonucleotide decoy
  source 1..12: mol_type = other DNA
tacaaagattaa

SEQ ID NO: 10 - DNA, 12 bp, synthetic construct
  misc_feature 1..12: note = oligonucleotide decoy
  source 1..12: mol_type = other DNA
tacaaagattat

SEQ ID NO: 11 - DNA, 12 bp, synthetic construct
  misc_feature 1..12: note = oligonucleotide decoy
  source 1..12: mol_type = other DNA
tagaaagattaa

SEQ ID NO: 12 - DNA, 12 bp, synthetic construct
  misc_feature 1..12: note = oligonucleotide decoy
  source 1..12: mol_type = other DNA
tagaaagattat

SEQ ID NO: 13 - DNA, 12 bp, synthetic construct
  misc_feature 1..12: note = oligonucleotide decoy
  source 1..12: mol_type = other DNA
ttcaaagattaa

SEQ ID NO: 14 - DNA, 12 bp, synthetic construct
  misc_feature 1..12: note = oligonucleotide decoy
  source 1..12: mol_type = other DNA
ttcaaagattat

SEQ ID NO: 15 - DNA, 12 bp, synthetic construct
  misc_feature 1..12: note = oligonucleotide decoy
  source 1..12: mol_type = other DNA
ttgaaagattaa

SEQ ID NO: 16 - DNA, 12 bp, synthetic construct
  misc_feature 1..12: note = oligonucleotide decoy
  source 1..12: mol_type = other DNA
ttgaaagattat

SEQ ID NO: 17 - DNA, 12 bp, synthetic construct
  misc_feature 1..12: note = oligonucleotide decoy
  source 1..12: mol_type = other DNA
ctttcataatcc

SEQ ID NO: 18 - DNA, 12 bp, synthetic construct
  misc_feature 1..12: note = oligonucleotide decoy
  source 1..12: mol_type = other DNA
ctttcataatct

SEQ ID NO: 19 - DNA, 12 bp, synthetic construct
  misc_feature 1..12: note = oligonucleotide decoy
  source 1..12: mol_type = other DNA
ctttcttaatcc

SEQ ID NO: 20 - DNA, 12 bp, synthetic construct
  misc_feature 1..12: note = oligonucleotide decoy
  source 1..12: mol_type = other DNA
ctttcttaatct

SEQ ID NO: 21 - DNA, 12 bp, synthetic construct
  misc_feature 1..12: note = oligonucleotide decoy
  source 1..12: mol_type = other DNA
ctttgataatcc

SEQ ID NO: 22 - DNA, 12 bp, synthetic construct
  misc_feature 1..12: note = oligonucleotide decoy
  source 1..12: mol_type = other DNA
ctttgataatct

SEQ ID NO: 23 - DNA, 12 bp, synthetic construct
  misc_feature 1..12: note = oligonucleotide decoy
  source 1..12: mol_type = other DNA
ctttgttaatcc

SEQ ID NO: 24 - DNA, 12 bp, synthetic construct
  misc_feature 1..12: note = oligonucleotide decoy
  source 1..12: mol_type = other DNA
ctttgttaatct

SEQ ID NO: 25 - DNA, 12 bp, synthetic construct
  misc_feature 1..12: note = oligonucleotide decoy
  source 1..12: mol_type = other DNA
agattaacaaag

SEQ ID NO: 26 - DNA, 12 bp, synthetic construct
  misc_feature 1..12: note = oligonucleotide decoy
  source 1..12: mol_type = other DNA
agattaagaaag

SEQ ID NO: 27 - DNA, 12 bp, synthetic construct
  misc_feature 1..12: note = oligonucleotide decoy
  source 1..12: mol_type = other DNA
agattatcaaag

SEQ ID NO: 28 - DNA, 12 bp, synthetic construct
  misc_feature 1..12: note = oligonucleotide decoy
  source 1..12: mol_type = other DNA
agattatgaaag

SEQ ID NO: 29 - DNA, 12 bp, synthetic construct
  misc_feature 1..12: note = oligonucleotide decoy
  source 1..12: mol_type = other DNA
ggattaacaaag

SEQ ID NO: 30 - DNA, 12 bp, synthetic construct
  misc_feature 1..12: note = oligonucleotide decoy
  source 1..12: mol_type = other DNA
ggattaagaaag

SEQ ID NO: 31 - DNA, 12 bp, synthetic construct
  misc_feature 1..12: note = oligonucleotide decoy
  source 1..12: mol_type = other DNA
ggattatcaaag

SEQ ID NO: 32 - DNA, 12 bp, synthetic construct
  misc_feature 1..12: note = oligonucleotide decoy
  source 1..12: mol_type = other DNA
ggattatgaaag

SEQ ID NO: 33 - DNA, 12 bp, synthetic construct
  misc_feature 1..12: note = oligonucleotide decoy
  source 1..12: mol_type = other DNA
ataatctttcaa

SEQ ID NO: 34 - DNA, 12 bp, synthetic construct
  misc_feature 1..12: note = oligonucleotide decoy
  source 1..12: mol_type = other DNA
ataatctttcat

SEQ ID NO: 35 - DNA, 12 bp, synthetic construct
  misc_feature 1..12: note = oligonucleotide decoy
  source 1..12: mol_type = other DNA
ataatctttcta

SEQ ID NO: 36 - DNA, 12 bp, synthetic construct
  misc_feature 1..12: note = oligonucleotide decoy
  source 1..12: mol_type = other DNA
ataatctttctt

SEQ ID NO: 37 - DNA, 12 bp, synthetic construct
  misc_feature 1..12: note = oligonucleotide decoy
  source 1..12: mol_type = other DNA
ataatctttgaa

SEQ ID NO: 38 - DNA, 12 bp, synthetic construct
  misc_feature 1..12: note = oligonucleotide decoy
  source 1..12: mol_type = other DNA
ataatctttgat

SEQ ID NO: 39 - DNA, 12 bp, synthetic construct
  misc_feature 1..12: note = oligonucleotide decoy
  source 1..12: mol_type = other DNA
ataatctttgta

SEQ ID NO: 40 - DNA, 12 bp, synthetic construct
  misc_feature 1..12: note = oligonucleotide decoy
  source 1..12: mol_type = other DNA
ataatctttgtt

SEQ ID NO: 41 - DNA, 12 bp, synthetic construct
  misc_feature 1..12: note = oligonucleotide decoy
  source 1..12: mol_type = other DNA
ttaatctttcaa

SEQ ID NO: 42 - DNA, 12 bp, synthetic construct
  misc_feature 1..12: note = oligonucleotide decoy
  source 1..12: mol_type = other DNA
ttaatctttcat

SEQ ID NO: 43 - DNA, 12 bp, synthetic construct
  misc_feature 1..12: note = oligonucleotide decoy
  source 1..12: mol_type = other DNA
ttaatctttcta

SEQ ID NO: 44 - DNA, 12 bp, synthetic construct
  misc_feature 1..12: note = oligonucleotide decoy
  source 1..12: mol_type = other DNA
ttaatctttctt

SEQ ID NO: 45 - DNA, 12 bp, synthetic construct
  misc_feature 1..12: note = oligonucleotide decoy
  source 1..12: mol_type = other DNA
ttaatctttgaa

SEQ ID NO: 46 - DNA, 12 bp, synthetic construct
  misc_feature 1..12: note = oligonucleotide decoy
  source 1..12: mol_type = other DNA
ttaatctttgat

SEQ ID NO: 47 - DNA, 12 bp, synthetic construct
  misc_feature 1..12: note = oligonucleotide decoy
  source 1..12: mol_type = other DNA
ttaatctttgta

SEQ ID NO: 48 - DNA, 12 bp, synthetic construct
  misc_feature 1..12: note = oligonucleotide decoy
  source 1..12: mol_type = other DNA
ttaatctttgtt

SEQ ID NO: 49 - DNA, 17 bp, synthetic construct
  misc_feature 1..17: note = oligonucleotide decoy
  source 1..17: mol_type = other DNA
aacaaagtaaataatcc

SEQ ID NO: 50 - DNA, 17 bp, synthetic construct
  misc_feature 1..17: note = oligonucleotide decoy
  source 1..17: mol_type = other DNA
aacaaagtaaataatct

SEQ ID NO: 51 - DNA, 17 bp, synthetic construct
  misc_feature 1..17: note = oligonucleotide decoy
  source 1..17: mol_type = other DNA
atcaaagtaaataatcc

SEQ ID NO: 52 - DNA, 17 bp, synthetic construct
  misc_feature 1..17: note = oligonucleotide decoy
  source 1..17: mol_type = other DNA
atcaaagtaaataatct

SEQ ID NO: 53 - DNA, 17 bp, synthetic construct
  misc_feature 1..17: note = oligonucleotide decoy
  source 1..17: mol_type = other DNA
tacaaagtaaataatcc

SEQ ID NO: 54 - DNA, 17 bp, synthetic construct
  misc_feature 1..17: note = oligonucleotide decoy
  source 1..17: mol_type = other DNA
tacaaagtaaataatct

SEQ ID NO: 55 - DNA, 17 bp, synthetic construct
  misc_feature 1..17: note = oligonucleotide decoy
  source 1..17: mol_type = other DNA
ttcaaagtaaataatcc

SEQ ID NO: 56 - DNA, 17 bp, synthetic construct
  misc_feature 1..17: note = oligonucleotide decoy
  source 1..17: mol_type = other DNA
ttcaaagtaaataatct

SEQ ID NO: 57 - DNA, 17 bp, synthetic construct
  misc_feature 1..17: note = oligonucleotide decoy
  source 1..17: mol_type = other DNA
aagaaagtaaataatcc

SEQ ID NO: 58 - DNA, 17 bp, synthetic construct
  misc_feature 1..17: note = oligonucleotide decoy
  source 1..17: mol_type = other DNA
aagaaagtaaataatct

SEQ ID NO: 59 - DNA, 17 bp, synthetic construct
  misc_feature 1..17: note = oligonucleotide decoy
  source 1..17: mol_type = other DNA
atgaaagtaaataatcc

SEQ ID NO: 60 - DNA, 17 bp, synthetic construct
  misc_feature 1..17: note = oligonucleotide decoy
  source 1..17: mol_type = other DNA
atgaaagtaaataatct

SEQ ID NO: 61 - DNA, 17 bp, synthetic construct
  misc_feature 1..17: note = oligonucleotide decoy
  source 1..17: mol_type = other DNA
tagaaagtaaataatcc

SEQ ID NO: 62 - DNA, 17 bp, synthetic construct
  misc_feature 1..17: note = oligonucleotide decoy
  source 1..17: mol_type = other DNA
tagaaagtaaataatct

SEQ ID NO: 63 - DNA, 17 bp, synthetic construct
  misc_feature 1..17: note = oligonucleotide decoy
  source 1..17: mol_type = other DNA
ttgaaagtaaataatcc

SEQ ID NO: 64 - DNA, 17 bp, synthetic construct
  misc_feature 1..17: note = oligonucleotide decoy
  source 1..17: mol_type = other DNA
ttgaaagtaaataatct

SEQ ID NO: 65 - DNA, 41 bp, synthetic construct
  misc_feature 1..41: note = oligonucleotide decoy
  source 1..41: mol_type = other DNA
aacagaaggtaaacaaagattaaggcgccaattgacaggtg

SEQ ID NO: 66 - DNA, 41 bp, synthetic construct
  misc_feature 1..41: note = oligonucleotide decoy
  source 1..41: mol_type = other DNA
aacagaaggtaaacaaagattaaggcgccatttgacaggtg

SEQ ID NO: 67 - DNA, 41 bp, synthetic construct
  misc_feature 1..41: note = oligonucleotide decoy
  source 1..41: mol_type = other DNA
aacagaaggtaaacaaagattaaggcgcctattgacaggtg

SEQ ID NO: 68 - DNA, 41 bp, synthetic construct
  misc_feature 1..41: note = oligonucleotide decoy
  source 1..41: mol_type = other DNA
aacagaaggtaaacaaagattaaggcgccttttgacaggtg

SEQ ID NO: 69 - DNA, 41 bp, synthetic construct
  misc_feature 1..41: note = oligonucleotide decoy
  source 1..41: mol_type = other DNA
aacagaaggtaaacaaagattatggcgccaattgacaggtg

SEQ ID NO: 70 - DNA, 41 bp, synthetic construct
  misc_feature 1..41: note = oligonucleotide decoy
  source 1..41: mol_type = other DNA
aacagaaggtaaacaaagattatggcgccatttgacaggtg

SEQ ID NO: 71 - DNA, 41 bp, synthetic construct
  misc_feature 1..41: note = oligonucleotide decoy
  source 1..41: mol_type = other DNA
aacagaaggtaaacaaagattatggcgcctattgacaggtg

SEQ ID NO: 72 - DNA, 41 bp, synthetic construct
  misc_feature 1..41: note = oligonucleotide decoy
  source 1..41: mol_type = other DNA
aacagaaggtaaacaaagattatggcgccttttgacaggtg

SEQ ID NO: 73 - DNA, 41 bp, synthetic construct
  misc_feature 1..41: note = oligonucleotide decoy
  source 1..41: mol_type = other DNA
aacagaaggtaaacaaagattaaggcgccaaatgacaggtg

SEQ ID NO: 74 - DNA, 41 bp, synthetic construct
  misc_feature 1..41: note = oligonucleotide decoy
  source 1..41: mol_type = other DNA
aacagaaggtaaacaaagattaaggcgccatatgacaggtg

SEQ ID NO: 75 - DNA, 41 bp, synthetic construct
  misc_feature 1..41: note = oligonucleotide decoy
  source 1..41: mol_type = other DNA
aacagaaggtaaacaaagattaaggcgcctaatgacaggtg

SEQ ID NO: 76 - DNA, 41 bp, synthetic construct
  misc_feature 1..41: note = oligonucleotide decoy
  source 1..41: mol_type = other DNA
aacagaaggtaaacaaagattaaggcgccttatgacaggtg

SEQ ID NO: 77 - DNA, 41 bp, synthetic construct
  misc_feature 1..41: note = oligonucleotide decoy
  source 1..41: mol_type = other DNA
aacagaaggtaaacaaagattatggcgccaaatgacaggtg

SEQ ID NO: 78 - DNA, 41 bp, synthetic construct
  misc_feature 1..41: note = oligonucleotide decoy
  source 1..41: mol_type = other DNA
aacagaaggtaaacaaagattatggcgccatatgacaggtg

SEQ ID NO: 79 - DNA, 41 bp, synthetic construct
  misc_feature 1..41: note = oligonucleotide decoy
  source 1..41: mol_type = other DNA
aacagaaggtaaacaaagattatggcgcctaatgacaggtg

SEQ ID NO: 80 - DNA, 41 bp, synthetic construct
  misc_feature 1..41: note = oligonucleotide decoy
  source 1..41: mol_type = other DNA
aacagaaggtaaacaaagattatggcgccttatgacaggtg

SEQ ID NO: 81 - DNA, 41 bp, synthetic construct; identical to SEQ ID NO: 65
  misc_feature 1..41: note = oligonucleotide decoy
  source 1..41: mol_type = other DNA

SEQ ID NO: 82 - DNA, 41 bp, synthetic construct; identical to SEQ ID NO: 66
  misc_feature 1..41: note = oligonucleotide decoy
  source 1..41: mol_type = other DNA

SEQ ID NO: 83 - DNA, 41 bp, synthetic construct; identical to SEQ ID NO: 67
  misc_feature 1..41: note = oligonucleotide decoy
  source 1..41: mol_type = other DNA

SEQ ID NO: 84 - DNA, 41 bp, synthetic construct; identical to SEQ ID NO: 68
  misc_feature 1..41: note = oligonucleotide decoy
  source 1..41: mol_type = other DNA

SEQ ID NO: 85 - DNA, 41 bp, synthetic construct; identical to SEQ ID NO: 69
  misc_feature 1..41: note = oligonucleotide decoy
  source 1..41: mol_type = other DNA

SEQ ID NO: 86 - DNA, 41 bp, synthetic construct; identical to SEQ ID NO: 70
  misc_feature 1..41: note = oligonucleotide decoy
  source 1..41: mol_type = other DNA

SEQ ID NO: 87 - DNA, 41 bp, synthetic construct; identical to SEQ ID NO: 71
  misc_feature 1..41: note = oligonucleotide decoy
  source 1..41: mol_type = other DNA

SEQ ID NO: 88 - DNA, 41 bp, synthetic construct; identical to SEQ ID NO: 72
  misc_feature 1..41: note = oligonucleotide decoy
  source 1..41: mol_type = other DNA

SEQ ID NO: 89 - DNA, 41 bp, synthetic construct; identical to SEQ ID NO: 73
  misc_feature 1..41: note = oligonucleotide decoy
  source 1..41: mol_type = other DNA

SEQ ID NO: 90 - DNA, 41 bp, synthetic construct; identical to SEQ ID NO: 74
  misc_feature 1..41: note = oligonucleotide decoy
  source 1..41: mol_type = other DNA

SEQ ID NO: 91 - DNA, 41 bp, synthetic construct; identical to SEQ ID NO: 75
  misc_feature 1..41: note = oligonucleotide decoy
  source 1..41: mol_type = other DNA

SEQ ID NO: 92 - DNA, 41 bp, synthetic construct; identical to SEQ ID NO: 76
  misc_feature 1..41: note = oligonucleotide decoy
  source 1..41: mol_type = other DNA

SEQ ID NO: 93 - DNA, 41 bp, synthetic construct; identical to SEQ ID NO: 77
  misc_feature 1..41: note = oligonucleotide decoy
  source 1..41: mol_type = other DNA

SEQ ID NO: 94 - DNA, 41 bp, synthetic construct; identical to SEQ ID NO: 78
  misc_feature 1..41: note = oligonucleotide decoy
  source 1..41: mol_type = other DNA

SEQ ID NO: 95 - DNA, 41 bp, synthetic construct; identical to SEQ ID NO: 79
  misc_feature 1..41: note = oligonucleotide decoy
  source 1..41: mol_type = other DNA

SEQ ID NO: 96 - DNA, 41 bp, synthetic construct; identical to SEQ ID NO: 80
  misc_feature 1..41: note = oligonucleotide decoy
  source 1..41: mol_type = other DNA

SEQ ID NO: 97 - DNA, 41 bp, synthetic construct
  misc_feature 1..41: note = oligonucleotide decoy
  source 1..41: mol_type = other DNA
aaaaggcgccataatctttgtttaccttctgttgacaggtg

SEQ ID NO: 98 - DNA, 41 bp, synthetic construct
  misc_feature 1..41: note = oligonucleotide decoy
  source 1..41: mol_type = other DNA
aaaaggcgccttaatctttgtttaccttctgttgacaggtg

SEQ ID NO: 99 - DNA, 41 bp, synthetic construct
  misc_feature 1..41: note = oligonucleotide decoy
  source 1..41: mol_type = other DNA
aaatggcgccataatctttgtttaccttctgttgacaggtg

SEQ ID NO: 100 - DNA, 41 bp, synthetic construct
  misc_feature 1..41: note = oligonucleotide decoy
  source 1..41: mol_type = other DNA
aaatggcgccttaatctttgtttaccttctgttgacaggtg

SEQ ID NO: 101 - DNA, 41 bp, synthetic construct
  misc_feature 1..41: note = oligonucleotide decoy
  source 1..41: mol_type = other DNA
aataggcgccataatctttgtttaccttctgttgacaggtg

SEQ ID NO: 102 - DNA, 41 bp, synthetic construct
  misc_feature 1..41: note = oligonucleotide decoy
  source 1..41: mol_type = other DNA
aataggcgccttaatctttgtttaccttctgttgacaggtg

SEQ ID NO: 103 - DNA, 41 bp, synthetic construct
  misc_feature 1..41: note = oligonucleotide decoy
  source 1..41: mol_type = other DNA
aattggcgccataatctttgtttaccttctgttgacaggtg

SEQ ID NO: 104 - DNA, 41 bp, synthetic construct
  misc_feature 1..41: note = oligonucleotide decoy
  source 1..41: mol_type = other DNA
aattggcgccttaatctttgtttaccttctgttgacaggtg

SEQ ID NO: 105 - DNA, 41 bp, synthetic construct
  misc_feature 1..41: note = oligonucleotide decoy
  source 1..41: mol_type = other DNA
ataaggcgccataatctttgtttaccttctgttgacaggtg

SEQ ID NO: 106 - DNA, 41 bp, synthetic construct
  misc_feature 1..41: note = oligonucleotide decoy
  source 1..41: mol_type = other DNA
ataaggcgccttaatctttgtttaccttctgttgacaggtg

SEQ ID NO: 107 - DNA, 41 bp, synthetic construct
  misc_feature 1..41: note = oligonucleotide decoy
  source 1..41: mol_type = other DNA
atatggcgccataatctttgtttaccttctgttgacaggtg

SEQ ID NO: 108 - DNA, 41 bp, synthetic construct
  misc_feature 1..41: note = oligonucleotide decoy
  source 1..41: mol_type = other DNA
atatggcgccttaatctttgtttaccttctgttgacaggtg

SEQ ID NO: 109 - DNA, 41 bp, synthetic construct
  misc_feature 1..41: note = oligonucleotide decoy
  source 1..41: mol_type = other DNA
attaggcgccataatctttgtttaccttctgttgacaggtg

SEQ ID NO: 110 - DNA, 41 bp, synthetic construct
  misc_feature 1..41: note = oligonucleotide decoy
  source 1..41: mol_type = other DNA
attaggcgccttaatctttgtttaccttctgttgacaggtg

SEQ ID NO: 111 - DNA, 41 bp, synthetic construct
  misc_feature 1..41: note = oligonucleotide decoy
  source 1..41: mol_type = other DNA
atttggcgccataatctttgtttaccttctgttgacaggtg

SEQ ID NO: 112 - DNA, 41 bp, synthetic construct
  misc_feature 1..41: note = oligonucleotide decoy
  source 1..41: mol_type = other DNA
atttggcgccttaatctttgtttaccttctgttgacaggtg

SEQ ID NO: 113 - DNA, 41 bp, synthetic construct
  misc_feature 1..41: note = oligonucleotide decoy
  source 1..41: mol_type = other DNA
taaaggcgccataatctttgtttaccttctgttgacaggtg

SEQ ID NO: 114 - DNA, 41 bp, synthetic construct
  misc_feature 1..41: note = oligonucleotide decoy
  source 1..41: mol_type = other DNA
taaaggcgccttaatctttgtttaccttctgttgacaggtg

SEQ ID NO: 115 - DNA, 41 bp, synthetic construct
  misc_feature 1..41: note = oligonucleotide decoy
  source 1..41: mol_type = other DNA
taatggcgccataatctttgtttaccttctgttgacaggtg

SEQ ID NO: 116 - DNA, 41 bp, synthetic construct
  misc_feature 1..41: note = oligonucleotide decoy
  source 1..41: mol_type = other DNA
taatggcgccttaatctttgtttaccttctgttgacaggtg

SEQ ID NO: 117 - DNA, 41 bp, synthetic construct
  misc_feature 1..41: note = oligonucleotide decoy
  source 1..41: mol_type = other DNA
tataggcgccataatctttgtttaccttctgttgacaggtg

SEQ ID NO: 118 - DNA, 41 bp, synthetic construct
  misc_feature 1..41: note = oligonucleotide decoy
  source 1..41: mol_type = other DNA
tataggcgccttaatctttgtttaccttctgttgacaggtg

SEQ ID NO: 119 - DNA, 41 bp, synthetic construct
  misc_feature 1..41: note = oligonucleotide decoy
  source 1..41: mol_type = other DNA
tattggcgccataatctttgtttaccttctgttgacaggtg

SEQ ID NO: 120 - DNA, 41 bp, synthetic construct
  misc_feature 1..41: note = oligonucleotide decoy
  source 1..41: mol_type = other DNA
tattggcgccttaatctttgtttaccttctgttgacaggtg

SEQ ID NO: 121 - DNA, 41 bp, synthetic construct
  misc_feature 1..41: note = oligonucleotide decoy
  source 1..41: mol_type = other DNA
ttaaggcgccataatctttgtttaccttctgttgacaggtg

SEQ ID NO: 122 - DNA, 41 bp, synthetic construct
  misc_feature 1..41: note = oligonucleotide decoy
  source 1..41: mol_type = other DNA
ttaaggcgccttaatctttgtttaccttctgttgacaggtg

SEQ ID NO: 123 - DNA, 41 bp, synthetic construct
  misc_feature 1..41: note = oligonucleotide decoy
  source 1..41: mol_type = other DNA
ttatggcgccataatctttgtttaccttctgttgacaggtg

SEQ ID NO: 124 - DNA, 41 bp, synthetic construct
  misc_feature 1..41: note = oligonucleotide decoy
  source 1..41: mol_type = other DNA
ttatggcgccttaatctttgtttaccttctgttgacaggtg

SEQ ID NO: 125 - DNA, 41 bp, synthetic construct
  misc_feature 1..41: note = oligonucleotide decoy
  source 1..41: mol_type = other DNA
tttaggcgccataatctttgtttaccttctgttgacaggtg

SEQ ID NO: 126 - DNA, 41 bp, synthetic construct
  misc_feature 1..41: note = oligonucleotide decoy
  source 1..41: mol_type = other DNA
tttaggcgccttaatctttgtttaccttctgttgacaggtg

SEQ ID NO: 127 - DNA, 41 bp, synthetic construct
  misc_feature 1..41: note = oligonucleotide decoy
  source 1..41: mol_type = other DNA
ttttggcgccataatctttgtttaccttctgttgacaggtg

SEQ ID NO: 128 - DNA, 41 bp, synthetic construct
  misc_feature 1..41: note = oligonucleotide decoy
  source 1..41: mol_type = other DNA
ttttggcgccttaatctttgtttaccttctgttgacaggtg

SEQ ID NO: 129 - DNA, 41 bp, synthetic construct
  misc_feature 1..41: note = oligonucleotide decoy
  source 1..41: mol_type = other DNA
cacctgtcaacagaaggtaaacaaagattaaggcgccaaaa

SEQ ID NO: 130 - DNA, 41 bp, synthetic construct
  misc_feature 1..41: note = oligonucleotide decoy
  source 1..41: mol_type = other DNA
cacctgtcaacagaaggtaaacaaagattaaggcgccaaat

SEQ ID NO: 131 - DNA, 41 bp, synthetic construct
  misc_feature 1..41: note = oligonucleotide decoy
  source 1..41: mol_type = other DNA
cacctgtcaacagaaggtaaacaaagattaaggcgccaata

SEQ ID NO: 132 - DNA, 41 bp, synthetic construct
  misc_feature 1..41: note = oligonucleotide decoy
  source 1..41: mol_type = other DNA
cacctgtcaacagaaggtaaacaaagattaaggcgccaatt

SEQ ID NO: 133 - DNA, 41 bp, synthetic construct
  misc_feature 1..41: note = oligonucleotide decoy
  source 1..41: mol_type = other DNA
cacctgtcaacagaaggtaaacaaagattaaggcgccataa

SEQ ID NO: 134 - DNA, 41 bp, synthetic construct
  misc_feature 1..41: note = oligonucleotide decoy
  source 1..41: mol_type = other DNA
cacctgtcaacagaaggtaaacaaagattaaggcgccatat

SEQ ID NO: 135 - DNA, 41 bp, synthetic construct
  misc_feature 1..41: note = oligonucleotide decoy
  source 1..41: mol_type = other DNA
cacctgtcaacagaaggtaaacaaagattaaggcgccatta

SEQ ID NO: 136 - DNA, 41 bp, synthetic construct
  misc_feature 1..41: note = oligonucleotide decoy
  source 1..41: mol_type = other DNA
cacctgtcaacagaaggtaaacaaagattaaggcgccattt

SEQ ID NO: 137 - DNA, 41 bp, synthetic construct
  misc_feature 1..41: note = oligonucleotide decoy
  source 1..41: mol_type = other DNA
cacctgtcaacagaaggtaaacaaagattaaggcgcctaaa

SEQ ID NO: 138 - DNA, 41 bp, synthetic construct
  misc_feature 1..41: note = oligonucleotide decoy
  source 1..41: mol_type = other DNA
cacctgtcaacagaaggtaaacaaagattaaggcgcctaat

SEQ ID NO: 139 - DNA, 41 bp, synthetic construct
  misc_feature 1..41: note = oligonucleotide decoy
  source 1..41: mol_type = other DNA
cacctgtcaacagaaggtaaacaaagattaaggcgcctata

SEQ ID NO: 140 - DNA, 41 bp, synthetic construct
  misc_feature 1..41: note = oligonucleotide decoy
  source 1..41: mol_type = other DNA
cacctgtcaacagaaggtaaacaaagattaaggcgcctatt

SEQ ID NO: 141 - DNA, 41 bp, synthetic construct
  misc_feature 1..41: note = oligonucleotide decoy
  source 1..41: mol_type = other DNA
cacctgtcaacagaaggtaaacaaagattaaggcgccttaa

SEQ ID NO: 142 - DNA, 41 bp, synthetic construct
  misc_feature 1..41: note = oligonucleotide decoy
  source 1..41: mol_type = other DNA
cacctgtcaacagaaggtaaacaaagattaaggcgccttat

SEQ ID NO: 143 - DNA, 41 bp, synthetic construct
  misc_feature 1..41: note = oligonucleotide decoy
  source 1..41: mol_type = other DNA
cacctgtcaacagaaggtaaacaaagattaaggcgccttta

SEQ ID NO: 144 - DNA, 41 bp, synthetic construct
  misc_feature 1..41: note = oligonucleotide decoy
  source 1..41: mol_type = other DNA
cacctgtcaacagaaggtaaacaaagattaaggcgcctttt

SEQ ID NO: 145 - DNA, 41 bp, synthetic construct
  misc_feature 1..41: note = oligonucleotide decoy
  source 1..41: mol_type = other DNA
cacctgtcaacagaaggtaaacaaagattatggcgccaaaa

SEQ ID NO: 146 - DNA, 41 bp, synthetic construct
  misc_feature 1..41: note = oligonucleotide decoy
  source 1..41: mol_type = other DNA
cacctgtcaacagaaggtaaacaaagattatggcgccaaat

SEQ ID NO: 147 - DNA, 41 bp, synthetic construct
  misc_feature 1..41: note = oligonucleotide decoy
  source 1..41: mol_type = other DNA
cacctgtcaacagaaggtaaacaaagattatggcgccaata

SEQ ID NO: 148 - DNA, 41 bp, synthetic construct
  misc_feature 1..41: note = oligonucleotide decoy
  source 1..41: mol_type = other DNA
cacctgtcaacagaaggtaaacaaagattatggcgccaatt

SEQ ID NO: 149 - DNA, 41 bp, synthetic construct
  misc_feature 1..41: note = oligonucleotide decoy
  source 1..41: mol_type = other DNA
cacctgtcaacagaaggtaaacaaagattatggcgccataa

SEQ ID NO: 150 - DNA, 41 bp, synthetic construct
  misc_feature 1..41: note = oligonucleotide decoy
  source 1..41: mol_type = other DNA
cacctgtcaacagaaggtaaacaaagattatggcgccatat

SEQ ID NO: 151 - DNA, 41 bp, synthetic construct
  misc_feature 1..41: note = oligonucleotide decoy
  source 1..41: mol_type = other DNA
cacctgtcaacagaaggtaaacaaagattatggcgccatta

SEQ ID NO: 152 - DNA, 41 bp, synthetic construct
  misc_feature 1..41: note = oligonucleotide decoy
  source 1..41: mol_type = other DNA
cacctgtcaacagaaggtaaacaaagattatggcgccattt

SEQ ID NO: 153 - DNA, 41 bp, synthetic construct
  misc_feature 1..41: note = oligonucleotide decoy
  source 1..41: mol_type = other DNA
cacctgtcaacagaaggtaaacaaagattatggcgcctaaa

SEQ ID NO: 154 - DNA, 41 bp, synthetic construct
  misc_feature 1..41: note = oligonucleotide decoy
  source 1..41: mol_type = other DNA
cacctgtcaacagaaggtaaacaaagattatggcgcctaat

SEQ ID NO: 155 - DNA, 41 bp, synthetic construct
  misc_feature 1..41: note = oligonucleotide decoy
  source 1..41: mol_type = other DNA
cacctgtcaacagaaggtaaacaaagattatggcgcctata

SEQ ID NO: 156 - DNA, 41 bp, synthetic construct
  misc_feature 1..41: note = oligonucleotide decoy
  source 1..41: mol_type = other DNA
cacctgtcaacagaaggtaaacaaagattatggcgcctatt

SEQ ID NO: 157 - DNA, 41 bp, synthetic construct
  misc_feature 1..41: note = oligonucleotide decoy
  source 1..41: mol_type = other DNA
cacctgtcaacagaaggtaaacaaagattatggcgccttaa

SEQ ID NO: 158 - DNA, 41 bp, synthetic construct
  misc_feature 1..41: note = oligonucleotide decoy
  source 1..41: mol_type = other DNA
cacctgtcaacagaaggtaaacaaagattatggcgccttat

SEQ ID NO: 159 - DNA, 41 bp, synthetic construct
  misc_feature 1..41: note = oligonucleotide decoy
  source 1..41: mol_type = other DNA
cacctgtcaacagaaggtaaacaaagattatggcgccttta

SEQ ID NO: 160 - DNA, 41 bp, synthetic construct
  misc_feature 1..41: note = oligonucleotide decoy
  source 1..41: mol_type = other DNA
cacctgtcaacagaaggtaaacaaagattatggcgcctttt

SEQ ID NO: 161 - DNA, 41 bp, synthetic construct
  misc_feature 1..41: note = oligonucleotide decoy
  source 1..41: mol_type = other DNA
cacctgtcaaaaggcgccataatctttgtttaccttctgtt

SEQ ID NO: 162 - DNA, 41 bp, synthetic construct
  misc_feature 1..41: note = oligonucleotide decoy
  source 1..41: mol_type = other DNA
cacctgtcaaaaggcgccttaatctttgtttaccttctgtt

SEQ ID NO: 163 - DNA, 41 bp, synthetic construct
  misc_feature 1..41: note = oligonucleotide decoy
  source 1..41: mol_type = other DNA
cacctgtcaaatggcgccataatctttgtttaccttctgtt

SEQ ID NO: 164 - DNA, 41 bp, synthetic construct
  misc_feature 1..41: note = oligonucleotide decoy
  source 1..41: mol_type = other DNA
cacctgtcaaatggcgccttaatctttgtttaccttctgtt

SEQ ID NO: 165 - DNA, 41 bp, synthetic construct
  misc_feature 1..41: note = oligonucleotide decoy
  source 1..41: mol_type = other DNA
cacctgtcaataggcgccataatctttgtttaccttctgtt

SEQ ID NO: 166 - DNA, 41 bp, synthetic construct
  misc_feature 1..41: note = oligonucleotide decoy
  source 1..41: mol_type = other DNA
cacctgtcaataggcgccttaatctttgtttaccttctgtt

SEQ ID NO: 167 - DNA, 41 bp, synthetic construct
  misc_feature 1..41: note = oligonucleotide decoy
  source 1..41: mol_type = other DNA
cacctgtcaattggcgccataatctttgtttaccttctgtt

SEQ ID NO: 168 - DNA, 41 bp, synthetic construct
  misc_feature 1..41: note = oligonucleotide decoy
  source 1..41: mol_type = other DNA
cacctgtcaattggcgccttaatctttgtttaccttctgtt

SEQ ID NO: 169 - DNA, 41 bp, synthetic construct
  misc_feature 1..41: note = oligonucleotide decoy
  source 1..41: mol_type = other DNA
cacctgtcataaggcgccataatctttgtttaccttctgtt

SEQ ID NO: 170 - DNA, 41 bp, synthetic construct
  misc_feature 1..41: note = oligonucleotide decoy
  source 1..41: mol_type = other DNA
cacctgtcataaggcgccttaatctttgtttaccttctgtt

SEQ ID NO: 171 - DNA, 41 bp, synthetic construct
  misc_feature 1..41: note = oligonucleotide decoy
  source 1..41: mol_type = other DNA
cacctgtcatatggcgccataatctttgtttaccttctgtt

SEQ ID NO: 172 - DNA, 41 bp, synthetic construct
  misc_feature 1..41: note = oligonucleotide decoy
  source 1..41: mol_type = other DNA
cacctgtcatatggcgccttaatctttgtttaccttctgtt

SEQ ID NO: 173 - DNA, 41 bp, synthetic construct
  misc_feature 1..41: note = oligonucleotide decoy
  source 1..41: mol_type = other DNA
cacctgtcattaggcgccataatctttgtttaccttctgtt

SEQ ID NO: 174 - DNA, 41 bp, synthetic construct
  misc_feature 1..41: note = oligonucleotide decoy
  source 1..41: mol_type = other DNA
cacctgtcattaggcgccttaatctttgtttaccttctgtt

SEQ ID NO: 175 - DNA, 41 bp, synthetic construct
  misc_feature 1..41: note = oligonucleotide decoy
  source 1..41: mol_type = other DNA
cacctgtcatttggcgccataatctttgtttaccttctgtt

SEQ ID NO: 176 - DNA, 41 bp, synthetic construct
  misc_feature 1..41: note = oligonucleotide decoy
  source 1..41: mol_type = other DNA
cacctgtcatttggcgccttaatctttgtttaccttctgtt

SEQ ID NO: 177 - DNA, 44 bp, synthetic construct
  misc_feature 1..44: note = oligonucleotide decoy
  source 1..44: mol_type = other DNA
aagatggctccacctgtttatttacacgtgacataacaacgatg

SEQ ID NO: 178 - DNA, 44 bp, synthetic construct
  misc_feature 1..44: note = oligonucleotide decoy
  source 1..44: mol_type = other DNA
aagatggctccacctgtttatttacacgtgacataacaacgctg

SEQ ID NO: 179 - DNA, 44 bp, synthetic construct
  misc_feature 1..44: note = oligonucleotide decoy
  source 1..44: mol_type = other DNA
aagatggctccacctgtttatttacacgtgacataacaacggtg

SEQ ID NO: 180 - DNA, 44 bp, synthetic construct
  misc_feature 1..44: note = oligonucleotide decoy
  source 1..44: mol_type = other DNA
aagatggctccacctgtttatttacacgtgacataacaacgttg

SEQ ID NO: 181 - DNA, 44 bp, synthetic construct
  misc_feature 1..44: note = oligonucleotide decoy
  source 1..44: mol_type = other DNA
aagatggctccacctgtttatttacacgtgacataacaccgatg

SEQ ID NO: 182 - DNA, 44 bp, synthetic construct
  misc_feature 1..44: note = oligonucleotide decoy
  source 1..44: mol_type = other DNA
aagatggctccacctgtttatttacacgtgacataacaccgctg

SEQ ID NO: 183 - DNA, 44 bp, synthetic construct
  misc_feature 1..44: note = oligonucleotide decoy
  source 1..44: mol_type = other DNA
aagatggctccacctgtttatttacacgtgacataacaccggtg

SEQ ID NO: 184 - DNA, 44 bp, synthetic construct
  misc_feature 1..44: note = oligonucleotide decoy
  source 1..44: mol_type = other DNA
aagatggctccacctgtttatttacacgtgacataacaccgttg

SEQ ID NO: 185 - DNA, 44 bp, synthetic construct
  misc_feature 1..44: note = oligonucleotide decoy
  source 1..44: mol_type = other DNA
aagatggctccacctgtttatttacacgtgacataacagcgatg

SEQ ID NO: 186 - DNA, 44 bp, synthetic construct
  misc_feature 1..44: note = oligonucleotide decoy
  source 1..44: mol_type = other DNA
aagatggctccacctgtttatttacacgtgacataacagcgctg

SEQ ID NO: 187 - DNA, 44 bp, synthetic construct
  misc_feature 1..44: note = oligonucleotide decoy
  source 1..44: mol_type = other DNA
aagatggctccacctgtttatttacacgtgacataacagcggtg

SEQ ID NO: 188 - DNA, 44 bp, synthetic construct
  misc_feature 1..44: note = oligonucleotide decoy
  source 1..44: mol_type = other DNA
aagatggctccacctgtttatttacacgtgacataacagcgttg

SEQ ID NO: 189 - DNA, 44 bp, synthetic construct
  misc_feature 1..44: note = oligonucleotide decoy
  source 1..44: mol_type = other DNA
aagatggctccacctgtttatttacacgtgacataacatcgatg

SEQ ID NO: 190 - DNA, 44 bp, synthetic construct
  misc_feature 1..44: note = oligonucleotide decoy
  source 1..44: mol_type = other DNA
aagatggctccacctgtttatttacacgtgacataacatcgctg

SEQ ID NO: 191 - DNA, 44 bp, synthetic construct
  misc_feature 1..44: note = oligonucleotide decoy
  source 1..44: mol_type = other DNA
aagatggctccacctgtttatttacacgtgacataacatcggtg

SEQ ID NO: 192 - DNA, 44 bp, synthetic construct
  misc_feature 1..44: note = oligonucleotide decoy
  source 1..44: mol_type = other DNA
aagatggctccacctgtttatttacacgtgacataacatcgttg

SEQ ID NO: 193 - DNA, 44 bp, synthetic construct
  misc_feature 1..44: note = oligonucleotide decoy
  source 1..44: mol_type = other DNA
aagatggctccacctgtttatttacacgtgacgtaacaacgatg

SEQ ID NO: 194 - DNA, 44 bp, synthetic construct
  misc_feature 1..44: note = oligonucleotide decoy
  source 1..44: mol_type = other DNA
aagatggctccacctgtttatttacacgtgacgtaacaacgctg

SEQ ID NO: 195 - DNA, 44 bp, synthetic construct
  misc_feature 1..44: note = oligonucleotide decoy
  source 1..44: mol_type = other DNA
aagatggctccacctgtttatttacacgtgacgtaacaacggtg

SEQ ID NO: 196 - DNA, 44 bp, synthetic construct
  misc_feature 1..44: note = oligonucleotide decoy
  source 1..44: mol_type = other DNA
aagatggctccacctgtttatttacacgtgacgtaacaacgttg

SEQ ID NO: 197 - DNA, 44 bp, synthetic construct
  misc_feature 1..44: note = oligonucleotide decoy
  source 1..44: mol_type = other DNA
aagatggctccacctgtttatttacacgtgacgtaacaccgatg

SEQ ID NO: 198 - DNA, 44 bp, synthetic construct
  misc_feature 1..44: note = oligonucleotide decoy
  source 1..44: mol_type = other DNA
aagatggctccacctgtttatttacacgtgacgtaacaccgctg

SEQ ID NO: 199 - DNA, 44 bp, synthetic construct
  misc_feature 1..44: note = oligonucleotide decoy
  source 1..44: mol_type = other DNA
aagatggctccacctgtttatttacacgtgacgtaacaccggtg

SEQ ID NO: 200 - DNA, 44 bp, synthetic construct
  misc_feature 1..44: note = oligonucleotide decoy
  source 1..44: mol_type = other DNA
aagatggctccacctgtttatttacacgtgacgtaacaccgttg

SEQ ID NO: 201 - DNA, 44 bp, synthetic construct
  misc_feature 1..44: note = oligonucleotide decoy
  source 1..44: mol_type = other DNA
aagatggctccacctgtttatttacacgtgacgtaacagcgatg

SEQ ID NO: 202 - DNA, 44 bp, synthetic construct
  misc_feature 1..44: note = oligonucleotide decoy
  source 1..44: mol_type = other DNA
aagatggctccacctgtttatttacacgtgacgtaacagcgctg

SEQ ID NO: 203 - DNA, 44 bp, synthetic construct
  misc_feature 1..44: note = oligonucleotide decoy
  source 1..44: mol_type = other DNA
aagatggctccacctgtttatttacacgtgacgtaacagcggtg

SEQ ID NO: 204 - DNA, 44 bp, synthetic construct
  misc_feature 1..44: note = oligonucleotide decoy
  source 1..44: mol_type = other DNA
aagatggctccacctgtttatttacacgtgacgtaacagcgttg

SEQ ID NO: 205 - DNA, 44 bp, synthetic construct
  misc_feature 1..44: note = oligonucleotide decoy
  source 1..44: mol_type = other DNA
aagatggctccacctgtttatttacacgtgacgtaacatcgatg

SEQ ID NO: 206 - DNA, 44 bp, synthetic construct
  misc_feature 1..44: note = oligonucleotide decoy
  source 1..44: mol_type = other DNA
aagatggctccacctgtttatttacacgtgacgtaacatcgctg

SEQ ID NO: 207 - DNA, 44 bp, synthetic construct
  misc_feature 1..44: note = oligonucleotide decoy
  source 1..44: mol_type = other DNA
aagatggctccacctgtttatttacacgtgacgtaacatcggtg

SEQ ID NO: 208 - DNA, 44 bp, synthetic construct
  misc_feature 1..44: note = oligonucleotide decoy
  source 1..44: mol_type = other DNA
aagatggctccacctgtttatttacacgtgacgtaacatcgttg

SEQ ID NO: 209 - DNA, 44 bp, synthetic construct
  misc_feature 1..44: note = oligonucleotide decoy
  source 1..44: mol_type = other DNA
aagatggctccacctgtttatttacacgtgatataacaacgatg

SEQ ID NO: 210 - DNA, 44 bp, synthetic construct
  misc_feature 1..44: note = oligonucleotide decoy
  source 1..44: mol_type = other DNA
aagatggctccacctgtttatttacacgtgatataacaacgctg

SEQ ID NO: 211 - DNA, 44 bp, synthetic construct
  misc_feature 1..44: note = oligonucleotide decoy
  source 1..44: mol_type = other DNA
aagatggctccacctgtttatttacacgtgatataacaacggtg

SEQ ID NO: 212 - DNA, 44 bp, synthetic construct
  misc_feature 1..44: note = oligonucleotide decoy
  source 1..44: mol_type = other DNA
aagatggctccacctgtttatttacacgtgatataacaacgttg

SEQ ID NO: 213 - DNA, 44 bp, synthetic construct
  misc_feature 1..44: note = oligonucleotide decoy
  source 1..44: mol_type = other DNA
aagatggctccacctgtttatttacacgtgatataacaccgatg

SEQ ID NO: 214 - DNA, 44 bp, synthetic construct
  misc_feature 1..44: note = oligonucleotide decoy
  source 1..44: mol_type = other DNA
aagatggctccacctgtttatttacacgtgatataacaccgctg

SEQ ID NO: 215 - DNA, 44 bp, synthetic construct
  misc_feature 1..44: note = oligonucleotide decoy
  source 1..44: mol_type = other DNA
aagatggctccacctgtttatttacacgtgatataacaccggtg

SEQ ID NO: 216 - DNA, 44 bp, synthetic construct
  misc_feature 1..44: note = oligonucleotide decoy
  source 1..44: mol_type = other DNA
aagatggctccacctgtttatttacacgtgatataacaccgttg

SEQ ID NO: 217 - DNA, 44 bp, synthetic construct
  misc_feature 1..44: note = oligonucleotide decoy
  source 1..44: mol_type = other DNA
aagatggctccacctgtttatttacacgtgatataacagcgatg

SEQ ID NO: 218 - DNA, 44 bp, synthetic construct
  misc_feature 1..44: note = oligonucleotide decoy
  source 1..44: mol_type = other DNA
aagatggctccacctgtttatttacacgtgatataacagcgctg

SEQ ID NO: 219 - DNA, 44 bp, synthetic construct
  misc_feature 1..44: note = oligonucleotide decoy
  source 1..44: mol_type = other DNA
aagatggctccacctgtttatttacacgtgatataacagcggtg

SEQ ID NO: 220 - DNA, 44 bp, synthetic construct
  misc_feature 1..44: note = oligonucleotide decoy
  source 1..44: mol_type = other DNA
aagatggctccacctgtttatttacacgtgatataacagcgttg

SEQ ID NO: 221 - DNA, 44 bp, synthetic construct
  misc_feature 1..44: note = oligonucleotide decoy
  source 1..44: mol_type = other DNA
aagatggctccacctgtttatttacacgtgatataacatcgatg

SEQ ID NO: 222 - DNA, 44 bp, synthetic construct
  misc_feature 1..44: note = oligonucleotide decoy
  source 1..44: mol_type = other DNA
aagatggctccacctgtttatttacacgtgatataacatcgctg

SEQ ID NO: 223 - DNA, 44 bp, synthetic construct
  misc_feature 1..44: note = oligonucleotide decoy
  source 1..44: mol_type = other DNA
aagatggctccacctgtttatttacacgtgatataacatcggtg

SEQ ID NO: 224 - DNA, 44 bp, synthetic construct
  misc_feature 1..44: note = oligonucleotide decoy
  source 1..44: mol_type = other DNA
aagatggctccacctgtttatttacacgtgatataacatcgttg

SEQ ID NO: 225 - DNA, 44 bp, synthetic construct
  misc_feature 1..44: note = oligonucleotide decoy
  source 1..44: mol_type = other DNA
aagatggctccacctgtttatttacacgtgatgtaacaacgatg

SEQ ID NO: 226 - DNA, 44 bp, synthetic construct
  misc_feature 1..44: note = oligonucleotide decoy
  source 1..44: mol_type = other DNA
aagatggctccacctgtttatttacacgtgatgtaacaacgctg

SEQ ID NO: 227 - DNA, 44 bp, synthetic construct
  misc_feature 1..44: note = oligonucleotide decoy
  source 1..44: mol_type = other DNA
aagatggctccacctgtttatttacacgtgatgtaacaacggtg

SEQ ID NO: 228 - DNA, 44 bp, synthetic construct
  misc_feature 1..44: note = oligonucleotide decoy
  source 1..44: mol_type = other DNA
aagatggctccacctgtttatttacacgtgatgtaacaacgttg

SEQ ID NO: 229 - DNA, 44 bp, synthetic construct
  misc_feature 1..44: note = oligonucleotide decoy
  source 1..44: mol_type = other DNA
aagatggctccacctgtttatttacacgtgatgtaacaccgatg

SEQ ID NO: 230 - DNA, 44 bp, synthetic construct
  misc_feature 1..44: note = oligonucleotide decoy
  source 1..44: mol_type = other DNA
aagatggctccacctgtttatttacacgtgatgtaacaccgctg

SEQ ID NO: 231 - DNA, 44 bp, synthetic construct
  misc_feature 1..44: note = oligonucleotide decoy
  source 1..44: mol_type = other DNA
aagatggctccacctgtttatttacacgtgatgtaacaccggtg

SEQ ID NO: 232 - DNA, 44 bp, synthetic construct
  misc_feature 1..44: note = oligonucleotide decoy
  source 1..44: mol_type = other DNA
aagatggctccacctgtttatttacacgtgatgtaacaccgttg

SEQ ID NO: 233 - DNA, 44 bp, synthetic construct
  misc_feature 1..44: note = oligonucleotide decoy
  source 1..44: mol_type = other DNA
aagatggctccacctgtttatttacacgtgatgtaacagcgatg

SEQ ID NO: 234 - DNA, 44 bp, synthetic construct
  misc_feature 1..44: note = oligonucleotide decoy
  source 1..44: mol_type = other DNA
aagatggctccacctgtttatttacacgtgatgtaacagcgctg

SEQ ID NO: 235 - DNA, 44 bp, synthetic construct
  misc_feature 1..44: note = oligonucleotide decoy
  source 1..44: mol_type = other DNA
aagatggctccacctgtttatttacacgtgatgtaacagcggtg

SEQ ID NO: 236 - DNA, 44 bp, synthetic construct
  misc_feature 1..44: note = oligonucleotide decoy
  source 1..44: mol_type = other DNA
aagatggctccacctgtttatttacacgtgatgtaacagcgttg

SEQ ID NO: 237 - DNA, 44 bp, synthetic construct
  misc_feature 1..44: note = oligonucleotide decoy
  source 1..44: mol_type = other DNA
aagatggctccacctgtttatttacacgtgatgtaacatcgatg

SEQ ID NO: 238 - DNA, 44 bp, synthetic construct
  misc_feature 1..44: note = oligonucleotide decoy
  source 1..44: mol_type = other DNA
aagatggctccacctgtttatttacacgtgatgtaacatcgctg

SEQ ID NO: 239 - DNA, 44 bp, synthetic construct
  misc_feature 1..44: note = oligonucleotide decoy
  source 1..44: mol_type = other DNA
aagatggctccacctgtttatttacacgtgatgtaacatcggtg

SEQ ID NO: 240 - DNA, 44 bp, synthetic construct
  misc_feature 1..44: note = oligonucleotide decoy
  source 1..44: mol_type = other DNA
aagatggctccacctgtttatttacacgtgatgtaacatcgttg

SEQ ID NO: 241 - DNA, 44 bp, synthetic construct
  misc_feature 1..44: note = oligonucleotide decoy
  source 1..44: mol_type = other DNA
aagatggctccacctgtttgtttacacgtgacataacaacgatg

SEQ ID NO: 242 - DNA, 44 bp, synthetic construct
  misc_feature 1..44: note = oligonucleotide decoy
  source 1..44: mol_type = other DNA
aagatggctccacctgtttgtttacacgtgacataacaacgctg

SEQ ID NO: 243 - DNA, 44 bp, synthetic construct
  misc_feature 1..44: note = oligonucleotide decoy
  source 1..44: mol_type = other DNA
aagatggctccacctgtttgtttacacgtgacataacaacggtg

SEQ ID NO: 244 - DNA, 44 bp, synthetic construct
  misc_feature 1..44: note = oligonucleotide decoy
  source 1..44: mol_type = other DNA
aagatggctccacctgtttgtttacacgtgacataacaacgttg

SEQ ID NO: 245 - DNA, 44 bp, synthetic construct
  misc_feature 1..44: note = oligonucleotide decoy
  source 1..44: mol_type = other DNA
aagatggctccacctgtttgtttacacgtgacataacaccgatg

SEQ ID NO: 246 - DNA, 44 bp, synthetic construct
  misc_feature 1..44: note = oligonucleotide decoy
  source 1..44: mol_type = other DNA
aagatggctccacctgtttgtttacacgtgacataacaccgctg

SEQ ID NO: 247 - DNA, 44 bp, synthetic construct
  misc_feature 1..44: note = oligonucleotide decoy
  source 1..44: mol_type = other DNA
aagatggctccacctgtttgtttacacgtgacataacaccggtg

SEQ ID NO: 248 - DNA, 44 bp, synthetic construct
  misc_feature 1..44: note = oligonucleotide decoy
  source 1..44: mol_type = other DNA
aagatggctccacctgtttgtttacacgtgacataacaccgttg

SEQ ID NO: 249 - DNA, 44 bp, synthetic construct
  misc_feature 1..44: note = oligonucleotide decoy
  source 1..44: mol_type = other DNA
aagatggctccacctgtttgtttacacgtgacataacagcgatg

SEQ ID NO: 250 - DNA, 44 bp, synthetic construct
  misc_feature 1..44: note = oligonucleotide decoy
  source 1..44: mol_type = other DNA
aagatggctccacctgtttgtttacacgtgacataacagcgctg

SEQ ID NO: 251 - DNA, 44 bp, synthetic construct
  misc_feature 1..44: note = oligonucleotide decoy
  source 1..44: mol_type = other DNA
aagatggctccacctgtttgtttacacgtgacataacagcggtg

SEQ ID NO: 252 - DNA, 44 bp, synthetic construct
  misc_feature 1..44: note = oligonucleotide decoy
  source 1..44: mol_type = other DNA
aagatggctccacctgtttgtttacacgtgacataacagcgttg

SEQ ID NO: 253 - DNA, 44 bp, synthetic construct
  misc_feature 1..44: note = oligonucleotide decoy
  source 1..44: mol_type = other DNA
aagatggctccacctgtttgtttacacgtgacataacatcgatg

SEQ ID NO: 254 - DNA, 44 bp, synthetic construct
  misc_feature 1..44: note = oligonucleotide decoy
  source 1..44: mol_type = other DNA
aagatggctccacctgtttgtttacacgtgacataacatcgctg

SEQ ID NO: 255 - DNA, 44 bp, synthetic construct
  misc_feature 1..44: note = oligonucleotide decoy
  source 1..44: mol_type = other DNA
aagatggctccacctgtttgtttacacgtgacataacatcggtg

SEQ ID NO: 256 - DNA, 44 bp, synthetic construct
  misc_feature 1..44: note = oligonucleotide decoy
  source 1..44: mol_type = other DNA
aagatggctccacctgtttgtttacacgtgacataacatcgttg

SEQ ID NO: 257 - DNA, 44 bp, synthetic construct
  misc_feature 1..44: note = oligonucleotide decoy
  source 1..44: mol_type = other DNA
aagatggctccacctgtttgtttacacgtgacgtaacaacgatg

SEQ ID NO: 258 - DNA, 44 bp, synthetic construct
  misc_feature 1..44: note = oligonucleotide decoy
  source 1..44: mol_type = other DNA
aagatggctccacctgtttgtttacacgtgacgtaacaacgctg

SEQ ID NO: 259 - DNA, 44 bp, synthetic construct
  misc_feature 1..44: note = oligonucleotide decoy
  source 1..44: mol_type = other DNA
aagatggctccacctgtttgtttacacgtgacgtaacaacggtg

SEQ ID NO: 260 - DNA, 44 bp, synthetic construct
  misc_feature 1..44: note = oligonucleotide decoy
  source 1..44: mol_type = other DNA
aagatggctccacctgtttgtttacacgtgacgtaacaacgttg

SEQ ID NO: 261 - DNA, 44 bp, synthetic construct
  misc_feature 1..44: note = oligonucleotide decoy
  source 1..44: mol_type = other DNA
aagatggctccacctgtttgtttacacgtgacgtaacaccgatg

SEQ ID NO: 262 - DNA, 44 bp, synthetic construct
  misc_feature 1..44: note = oligonucleotide decoy
  source 1..44: mol_type = other DNA
aagatggctccacctgtttgtttacacgtgacgtaacaccgctg

SEQ ID NO: 263 - DNA, 44 bp, synthetic construct
  misc_feature 1..44: note = oligonucleotide decoy
  source 1..44: mol_type = other DNA
aagatggctccacctgtttgtttacacgtgacgtaacaccggtg

SEQ ID NO: 264 - DNA, 44 bp, synthetic construct
  misc_feature 1..44: note = oligonucleotide decoy
  source 1..44: mol_type = other DNA
aagatggctccacctgtttgtttacacgtgacgtaacaccgttg

SEQ ID NO: 265 - DNA, 44 bp, synthetic construct
  misc_feature 1..44: note = oligonucleotide decoy
  source 1..44: mol_type = other DNA
aagatggctccacctgtttgtttacacgtgacgtaacagcgatg

SEQ ID NO: 266 - DNA, 44 bp, synthetic construct
  misc_feature 1..44: note = oligonucleotide decoy
  source 1..44: mol_type = other DNA
aagatggctccacctgtttgtttacacgtgacgtaacagcgctg

SEQ ID NO: 267 - DNA, 44 bp, synthetic construct
  misc_feature 1..44: note = oligonucleotide decoy
  source 1..44: mol_type = other DNA
aagatggctccacctgtttgtttacacgtgacgtaacagcggtg

SEQ ID NO: 268 - DNA, 44 bp, synthetic construct
  misc_feature 1..44: note = oligonucleotide decoy
  source 1..44: mol_type = other DNA
aagatggctccacctgtttgtttacacgtgacgtaacagcgttg

SEQ ID NO: 269 - DNA, 44 bp, synthetic construct
  misc_feature 1..44: note = oligonucleotide decoy
  source 1..44: mol_type = other DNA
aagatggctccacctgtttgtttacacgtgacgtaacatcgatg

SEQ ID NO: 270 - DNA, 44 bp, synthetic construct
  misc_feature 1..44: note = oligonucleotide decoy
  source 1..44: mol_type = other DNA
aagatggctccacctgtttgtttacacgtgacgtaacatcgctg

SEQ ID NO: 271 - DNA, 44 bp, synthetic construct
  misc_feature 1..44: note = oligonucleotide decoy
  source 1..44: mol_type = other DNA
aagatggctccacctgtttgtttacacgtgacgtaacatcggtg

SEQ ID NO: 272 - DNA, 44 bp, synthetic construct
  misc_feature 1..44: note = oligonucleotide decoy
  source 1..44: mol_type = other DNA
aagatggctccacctgtttgtttacacgtgacgtaacatcgttg

SEQ ID NO: 273 - DNA, 44 bp, synthetic construct
  misc_feature 1..44: note = oligonucleotide decoy
  source 1..44: mol_type = other DNA
aagatggctccacctgtttgtttacacgtgatataacaacgatg

SEQ ID NO: 274 - DNA, 44 bp, synthetic construct
  misc_feature 1..44: note = oligonucleotide decoy
  source 1..44: mol_type = other DNA
aagatggctccacctgtttgtttacacgtgatataacaacgctg

SEQ ID NO: 275 - DNA, 44 bp, synthetic construct
  misc_feature 1..44: note = oligonucleotide decoy
  source 1..44: mol_type = other DNA
aagatggctccacctgtttgtttacacgtgatataacaacggtg

SEQ ID NO: 276 - DNA, 44 bp, synthetic construct
  misc_feature 1..44: note = oligonucleotide decoy
  source 1..44: mol_type = other DNA
aagatggctccacctgtttgtttacacgtgatataacaacgttg

SEQ ID NO: 277 - DNA, 44 bp, synthetic construct
  misc_feature 1..44: note = oligonucleotide decoy
  source 1..44: mol_type = other DNA
aagatggctccacctgtttgtttacacgtgatataacaccgatg

SEQ ID NO: 278 - DNA, 44 bp, synthetic construct
  misc_feature 1..44: note = oligonucleotide decoy
  source 1..44: mol_type = other DNA
aagatggctccacctgtttgtttacacgtgatataacaccgctg

SEQ ID NO: 279 - DNA, 44 bp, synthetic construct
  misc_feature 1..44: note = oligonucleotide decoy
  source 1..44: mol_type = other DNA
aagatggctccacctgtttgtttacacgtgatataacaccggtg

SEQ ID NO: 280 - DNA, 44 bp, synthetic construct
  misc_feature 1..44: note = oligonucleotide decoy
  source 1..44: mol_type = other DNA
aagatggctccacctgtttgtttacacgtgatataacaccgttg

SEQ ID NO: 281 - DNA, 44 bp, synthetic construct
  misc_feature 1..44: note = oligonucleotide decoy
  source 1..44: mol_type = other DNA
aagatggctccacctgtttgtttacacgtgatataacagcgatg

SEQ ID NO: 282 - DNA, 44 bp, synthetic construct
  misc_feature 1..44: note = oligonucleotide decoy
  source 1..44: mol_type = other DNA
aagatggctccacctgtttgtttacacgtgatataacagcgctg

SEQ ID NO: 283 - DNA, 44 bp, synthetic construct
  misc_feature 1..44: note = oligonucleotide decoy
  source 1..44: mol_type = other DNA
aagatggctccacctgtttgtttacacgtgatataacagcggtg

SEQ ID NO: 284 - DNA, 44 bp, synthetic construct
  misc_feature 1..44: note = oligonucleotide decoy
  source 1..44: mol_type = other DNA
aagatggctccacctgtttgtttacacgtgatataacagcgttg

SEQ ID NO: 285 - DNA, 44 bp, synthetic construct
  misc_feature 1..44: note = oligonucleotide decoy
  source 1..44: mol_type = other DNA
aagatggctccacctgtttgtttacacgtgatataacatcgatg

SEQ ID NO: 286 - DNA, 44 bp, synthetic construct
  misc_feature 1..44: note = oligonucleotide decoy
  source 1..44: mol_type = other DNA
aagatggctccacctgtttgtttacacgtgatataacatcgctg

SEQ ID NO: 287 - DNA, 44 bp, synthetic construct
  misc_feature 1..44: note = oligonucleotide decoy
  source 1..44: mol_type = other DNA
aagatggctccacctgtttgtttacacgtgatataacatcggtg

SEQ ID NO: 288 - DNA, 44 bp, synthetic construct
  misc_feature 1..44: note = oligonucleotide decoy
  source 1..44: mol_type = other DNA
aagatggctccacctgtttgtttacacgtgatataacatcgttg

SEQ ID NO: 289 - DNA, 44 bp, synthetic construct
  misc_feature 1..44: note = oligonucleotide decoy
  source 1..44: mol_type = other DNA
aagatggctccacctgtttgtttacacgtgatgtaacaacgatg

SEQ ID NO: 290 - DNA, 44 bp, synthetic construct
  misc_feature 1..44: note = oligonucleotide decoy
  source 1..44: mol_type = other DNA
aagatggctccacctgtttgtttacacgtgatgtaacaacgctg

SEQ ID NO: 291 - DNA, 44 bp, synthetic construct
  misc_feature 1..44: note = oligonucleotide decoy
  source 1..44: mol_type = other DNA
aagatggctccacctgtttgtttacacgtgatgtaacaacggtg

SEQ ID NO: 292 - DNA, 44 bp, synthetic construct
  misc_feature 1..44: note = oligonucleotide decoy
  source 1..44: mol_type = other DNA
aagatggctccacctgtttgtttacacgtgatgtaacaacgttg

SEQ ID NO: 293 - DNA, 44 bp, synthetic construct
  misc_feature 1..44: note = oligonucleotide decoy
  source 1..44: mol_type = other DNA
aagatggctccacctgtttgtttacacgtgatgtaacaccgatg

SEQ ID NO: 294 - DNA, 44 bp, synthetic construct
  misc_feature 1..44: note = oligonucleotide decoy
  source 1..44: mol_type = other DNA
aagatggctccacctgtttgtttacacgtgatgtaacaccgctg

SEQ ID NO: 295 - DNA, 44 bp, synthetic construct
  misc_feature 1..44: note = oligonucleotide decoy
  source 1..44: mol_type = other DNA
aagatggctccacctgtttgtttacacgtgatgtaacaccggtg

SEQ ID NO: 296 - DNA, 44 bp, synthetic construct
  misc_feature 1..44: note = oligonucleotide decoy
  source 1..44: mol_type = other DNA
aagatggctccacctgtttgtttacacgtgatgtaacaccgttg

SEQ ID NO: 297 - DNA, 44 bp, synthetic construct
  misc_feature 1..44: note = oligonucleotide decoy
  source 1..44: mol_type = other DNA
aagatggctccacctgtttgtttacacgtgatgtaacagcgatg

SEQ ID NO: 298 - DNA, 44 bp, synthetic construct
  misc_feature 1..44: note = oligonucleotide decoy
  source 1..44: mol_type = other DNA
aagatggctccacctgtttgtttacacgtgatgtaacagcgctg

SEQ ID NO: 299 - DNA, 44 bp, synthetic construct
  misc_feature 1..44: note = oligonucleotide decoy
  source 1..44: mol_type = other DNA
aagatggctccacctgtttgtttacacgtgatgtaacagcggtg

SEQ ID NO: 300 - DNA, 44 bp, synthetic construct
  misc_feature 1..44: note = oligonucleotide decoy
  source 1..44: mol_type = other DNA
aagatggctccacctgtttgtttacacgtgatgtaacagcgttg

SEQ ID NO: 301 - DNA, 44 bp, synthetic construct
  misc_feature 1..44: note = oligonucleotide decoy
  source 1..44: mol_type = other DNA
aagatggctccacctgtttgtttacacgtgatgtaacatcgatg

SEQ ID NO: 302 - DNA, 44 bp, synthetic construct
  misc_feature 1..44: note = oligonucleotide decoy
  source 1..44: mol_type = other DNA
aagatggctccacctgtttgtttacacgtgatgtaacatcgctg

SEQ ID NO: 303 - DNA, 44 bp, synthetic construct
  misc_feature 1..44: note = oligonucleotide decoy
  source 1..44: mol_type = other DNA
aagatggctccacctgtttgtttacacgtgatgtaacatcggtg

SEQ ID NO: 304 - DNA, 44 bp, synthetic construct
  misc_feature 1..44: note = oligonucleotide decoy
  source 1..44: mol_type = other DNA
aagatggctccacctgtttgtttacacgtgatgtaacatcgttg

SEQ ID NO: 305 - DNA, 44 bp, synthetic construct
  misc_feature 1..44: note = oligonucleotide decoy
  source 1..44: mol_type = other DNA
aaaatggctccacctgtttatttacacgtgacataacaacgatg

SEQ ID NO: 306 - DNA, 44 bp, synthetic construct
  misc_feature 1..44: note = oligonucleotide decoy
  source 1..44: mol_type = other DNA
aaaatggctccacctgtttatttacacgtgacataacaacgctg

SEQ ID NO: 307 - DNA, 44 bp, synthetic construct
  misc_feature 1..44: note = oligonucleotide decoy
  source 1..44: mol_type = other DNA
aaaatggctccacctgtttatttacacgtgacataacaacggtg

SEQ ID NO: 308 - DNA, 44 bp, synthetic construct
  misc_feature 1..44: note = oligonucleotide decoy
  source 1..44: mol_type = other DNA
aaaatggctccacctgtttatttacacgtgacataacaacgttg

SEQ ID NO: 309 - DNA, 44 bp, synthetic construct
  misc_feature 1..44: note = oligonucleotide decoy
  source 1..44: mol_type = other DNA
aaaatggctccacctgtttatttacacgtgacataacaccgatg

SEQ ID NO: 310 - DNA, 44 bp, synthetic construct
  misc_feature 1..44: note = oligonucleotide decoy
  source 1..44: mol_type = other DNA
aaaatggctccacctgtttatttacacgtgacataacaccgctg

SEQ ID NO: 311 - DNA, 44 bp, synthetic construct
  misc_feature 1..44: note = oligonucleotide decoy
  source 1..44: mol_type = other DNA
aaaatggctccacctgtttatttacacgtgacataacaccggtg

SEQ ID NO: 312 - DNA, 44 bp, synthetic construct
  misc_feature 1..44: note = oligonucleotide decoy
  source 1..44: mol_type = other DNA
aaaatggctccacctgtttatttacacgtgacataacaccgttg

SEQ ID NO: 313 - DNA, 44 bp, synthetic construct
  misc_feature 1..44: note = oligonucleotide decoy
  source 1..44: mol_type = other DNA
aaaatggctccacctgtttatttacacgtgacataacagcgatg

SEQ ID NO: 314 - DNA, 44 bp, synthetic construct
  misc_feature 1..44: note = oligonucleotide decoy
  source 1..44: mol_type = other DNA
aaaatggctccacctgtttatttacacgtgacataacagcgctg

SEQ ID NO: 315 - DNA, 44 bp, synthetic construct
  misc_feature 1..44: note = oligonucleotide decoy
  source 1..44: mol_type = other DNA
aaaatggctccacctgtttatttacacgtgacataacagcggtg

SEQ ID NO: 316 - DNA, 44 bp, synthetic construct
  misc_feature 1..44: note = oligonucleotide decoy
  source 1..44: mol_type = other DNA
aaaatggctccacctgtttatttacacgtgacataacagcgttg

SEQ ID NO: 317 - DNA, 44 bp, synthetic construct
  misc_feature 1..44: note = oligonucleotide decoy
  source 1..44: mol_type = other DNA
aaaatggctccacctgtttatttacacgtgacataacatcgatg

SEQ ID NO: 318 - DNA, 44 bp, synthetic construct
  misc_feature 1..44: note = oligonucleotide decoy
  source 1..44: mol_type = other DNA
aaaatggctccacctgtttatttacacgtgacataacatcgctg

SEQ ID NO: 319 - DNA, 44 bp, synthetic construct
  misc_feature 1..44: note = oligonucleotide decoy
  source 1..44: mol_type = other DNA
aaaatggctccacctgtttatttacacgtgacataacatcggtg

SEQ ID NO: 320 - DNA, 44 bp, synthetic construct
  misc_feature 1..44: note = oligonucleotide decoy
  source 1..44: mol_type = other DNA
aaaatggctccacctgtttatttacacgtgacataacatcgttg

SEQ ID NO: 321 - DNA, 44 bp, synthetic construct
  misc_feature 1..44: note = oligonucleotide decoy
  source 1..44: mol_type = other DNA
aaaatggctccacctgtttatttacacgtgacgtaacaacgatg

SEQ ID NO: 322 - DNA, 44 bp, synthetic construct
  misc_feature 1..44: note = oligonucleotide decoy
  source 1..44: mol_type = other DNA
aaaatggctccacctgtttatttacacgtgacgtaacaacgctg

SEQ ID NO: 323 - DNA, 44 bp, synthetic construct
  misc_feature 1..44: note = oligonucleotide decoy
  source 1..44: mol_type = other DNA
aaaatggctccacctgtttatttacacgtgacgtaacaacggtg

SEQ ID NO: 324 - DNA, 44 bp, synthetic construct
  misc_feature 1..44: note = oligonucleotide decoy
  source 1..44: mol_type = other DNA
aaaatggctccacctgtttatttacacgtgacgtaacaacgttg

SEQ ID NO: 325 - DNA, 44 bp, synthetic construct
  misc_feature 1..44: note = oligonucleotide decoy
  source 1..44: mol_type = other DNA
aaaatggctccacctgtttatttacacgtgacgtaacaccgatg

SEQ ID NO: 326 - DNA, 44 bp, synthetic construct
  misc_feature 1..44: note = oligonucleotide decoy
  source 1..44: mol_type = other DNA
aaaatggctccacctgtttatttacacgtgacgtaacaccgctg

SEQ ID NO: 327 - DNA, 44 bp, synthetic construct
  misc_feature 1..44: note = oligonucleotide decoy
  source 1..44: mol_type = other DNA
aaaatggctccacctgtttatttacacgtgacgtaacaccggtg

SEQ ID NO: 328 - DNA, 44 bp, synthetic construct
  misc_feature 1..44: note = oligonucleotide decoy
  source 1..44: mol_type = other DNA
aaaatggctccacctgtttatttacacgtgacgtaacaccgttg

SEQ ID NO: 329 - DNA, 44 bp, synthetic construct
  misc_feature 1..44: note = oligonucleotide decoy
  source 1..44: mol_type = other DNA
aaaatggctccacctgtttatttacacgtgacgtaacagcgatg

SEQ ID NO: 330 - DNA, 44 bp, synthetic construct
  misc_feature 1..44: note = oligonucleotide decoy
  source 1..44: mol_type = other DNA
aaaatggctccacctgtttatttacacgtgacgtaacagcgctg

SEQ ID NO: 331 - DNA, 44 bp, synthetic construct
  misc_feature 1..44: note = oligonucleotide decoy
  source 1..44: mol_type = other DNA
aaaatggctccacctgtttatttacacgtgacgtaacagcggtg

SEQ ID NO: 332 - DNA, 44 bp, synthetic construct
  misc_feature 1..44: note = oligonucleotide decoy
  source 1..44: mol_type = other DNA
aaaatggctccacctgtttatttacacgtgacgtaacagcgttg

SEQ ID NO: 333 - DNA, 44 bp, synthetic construct
  misc_feature 1..44: note = oligonucleotide decoy
  source 1..44: mol_type = other DNA
aaaatggctccacctgtttatttacacgtgacgtaacatcgatg

SEQ ID NO: 334 - DNA, 44 bp, synthetic construct
  misc_feature 1..44: note = oligonucleotide decoy
  source 1..44: mol_type = other DNA
aaaatggctccacctgtttatttacacgtgacgtaacatcgctg

SEQ ID NO: 335 - DNA, 44 bp, synthetic construct
  misc_feature 1..44: note = oligonucleotide decoy
  source 1..44: mol_type = other DNA
aaaatggctccacctgtttatttacacgtgacgtaacatcggtg

SEQ ID NO: 336 - DNA, 44 bp, synthetic construct
  misc_feature 1..44: note = oligonucleotide decoy
  source 1..44: mol_type = other DNA
aaaatggctccacctgtttatttacacgtgacgtaacatcgttg

SEQ ID NO: 337 - DNA, 44 bp, synthetic construct
  misc_feature 1..44: note = oligonucleotide decoy
  source 1..44: mol_type = other DNA
aaaatggctccacctgtttatttacacgtgatataacaacgatg

SEQ ID NO: 338 - DNA, 44 bp, synthetic construct
  misc_feature 1..44: note = oligonucleotide decoy
  source 1..44: mol_type = other DNA
aaaatggctccacctgtttatttacacgtgatataacaacgctg

SEQ ID NO: 339 - DNA, 44 bp, synthetic construct
  misc_feature 1..44: note = oligonucleotide decoy
  source 1..44: mol_type = other DNA
aaaatggctccacctgtttatttacacgtgatataacaacggtg

SEQ ID NO: 340 - DNA, 44 bp, synthetic construct
  misc_feature 1..44: note = oligonucleotide decoy
  source 1..44: mol_type = other DNA
aaaatggctccacctgtttatttacacgtgatataacaacgttg

SEQ ID NO: 341 - DNA, 44 bp, synthetic construct
  misc_feature 1..44: note = oligonucleotide decoy
  source 1..44: mol_type = other DNA
aaaatggctccacctgtttatttacacgtgatataacaccgatg

SEQ ID NO: 342 - DNA, 44 bp, synthetic construct
  misc_feature 1..44: note = oligonucleotide decoy
  source 1..44: mol_type = other DNA
aaaatggctccacctgtttatttacacgtgatataacaccgctg

SEQ ID NO: 343 - DNA, 44 bp, synthetic construct
  misc_feature 1..44: note = oligonucleotide decoy
  source 1..44: mol_type = other DNA
aaaatggctccacctgtttatttacacgtgatataacaccggtg

SEQ ID NO: 344 - DNA, 44 bp, synthetic construct
  misc_feature 1..44: note = oligonucleotide decoy
  source 1..44: mol_type = other DNA
aaaatggctccacctgtttatttacacgtgatataacaccgttg

SEQ ID NO: 345 - DNA, 44 bp, synthetic construct
  misc_feature 1..44: note = oligonucleotide decoy
  source 1..44: mol_type = other DNA
aaaatggctccacctgtttatttacacgtgatataacagcgatg

SEQ ID NO: 346 - DNA, 44 bp, synthetic construct
  misc_feature 1..44: note = oligonucleotide decoy
  source 1..44: mol_type = other DNA
aaaatggctccacctgtttatttacacgtgatataacagcgctg

SEQ ID NO: 347 - DNA, 44 bp, synthetic construct
  misc_feature 1..44: note = oligonucleotide decoy
  source 1..44: mol_type = other DNA
aaaatggctccacctgtttatttacacgtgatataacagcggtg

SEQ ID NO: 348 - DNA, 44 bp, synthetic construct
  misc_feature 1..44: note = oligonucleotide decoy
  source 1..44: mol_type = other DNA
aaaatggctccacctgtttatttacacgtgatataacagcgttg

SEQ ID NO: 349 - DNA, 44 bp, synthetic construct
  misc_feature 1..44: note = oligonucleotide decoy
  source 1..44: mol_type = other DNA
aaaatggctccacctgtttatttacacgtgatataacatcgatg

SEQ ID NO: 350 - DNA, 44 bp, synthetic construct
  misc_feature 1..44: note = oligonucleotide decoy
  source 1..44: mol_type = other DNA
aaaatggctccacctgtttatttacacgtgatataacatcgctg

SEQ ID NO: 351 - DNA, 44 bp, synthetic construct
  misc_feature 1..44: note = oligonucleotide decoy
  source 1..44: mol_type = other DNA
aaaatggctccacctgtttatttacacgtgatataacatcggtg

SEQ ID NO: 352 - DNA, 44 bp, synthetic construct
  misc_feature 1..44: note = oligonucleotide decoy
  source 1..44: mol_type = other DNA
aaaatggctccacctgtttatttacacgtgatataacatcgttg

SEQ ID NO: 353 - DNA, 44 bp, synthetic construct
  misc_feature 1..44: note = oligonucleotide decoy
  source 1..44: mol_type = other DNA
aaaatggctccacctgtttatttacacgtgatgtaacaacgatg

SEQ ID NO: 354 - DNA, 44 bp, synthetic construct
  misc_feature 1..44: note = oligonucleotide decoy
  source 1..44: mol_type = other DNA
aaaatggctccacctgtttatttacacgtgatgtaacaacgctg

SEQ ID NO: 355 - DNA, 44 bp, synthetic construct
  misc_feature 1..44: note = oligonucleotide decoy
  source 1..44: mol_type = other DNA
aaaatggctccacctgtttatttacacgtgatgtaacaacggtg

SEQ ID NO: 356 - DNA, 44 bp, synthetic construct
  misc_feature 1..44: note = oligonucleotide decoy
  source 1..44: mol_type = other DNA
aaaatggctccacctgtttatttacacgtgatgtaacaacgttg

SEQ ID NO: 357 - DNA, 44 bp, synthetic construct
  misc_feature 1..44: note = oligonucleotide decoy
  source 1..44: mol_type = other DNA
aaaatggctccacctgtttatttacacgtgatgtaacaccgatg

SEQ ID NO: 358 - DNA, 44 bp, synthetic construct
  misc_feature 1..44: note = oligonucleotide decoy
  source 1..44: mol_type = other DNA
aaaatggctccacctgtttatttacacgtgatgtaacaccgctg

SEQ ID NO: 359 - DNA, 44 bp, synthetic construct
  misc_feature 1..44: note = oligonucleotide decoy
  source 1..44: mol_type = other DNA
aaaatggctccacctgtttatttacacgtgatgtaacaccggtg

SEQ ID NO: 360 - DNA, 44 bp, synthetic construct
  misc_feature 1..44: note = oligonucleotide decoy
  source 1..44: mol_type = other DNA
aaaatggctccacctgtttatttacacgtgatgtaacaccgttg

SEQ ID NO: 361 - DNA, 44 bp, synthetic construct
  misc_feature 1..44: note = oligonucleotide decoy
  source 1..44: mol_type = other DNA
aaaatggctccacctgtttatttacacgtgatgtaacagcgatg

SEQ ID NO: 362 - DNA, 44 bp, synthetic construct
  misc_feature 1..44: note = oligonucleotide decoy
  source 1..44: mol_type = other DNA
aaaatggctccacctgtttatttacacgtgatgtaacagcgctg

SEQ ID NO: 363 - DNA, 44 bp, synthetic construct
  misc_feature 1..44: note = oligonucleotide decoy
  source 1..44: mol_type = other DNA
aaaatggctccacctgtttatttacacgtgatgtaacagcggtg

SEQ ID NO: 364 - DNA, 44 bp, synthetic construct
  misc_feature 1..44: note = oligonucleotide decoy
  source 1..44: mol_type = other DNA
aaaatggctccacctgtttatttacacgtgatgtaacagcgttg

SEQ ID NO: 365 - DNA, 44 bp, synthetic construct
  misc_feature 1..44: note = oligonucleotide decoy
  source 1..44: mol_type = other DNA
aaaatggctccacctgtttatttacacgtgatgtaacatcgatg

SEQ ID NO: 366 - DNA, 44 bp, synthetic construct
  misc_feature 1..44: note = oligonucleotide decoy
  source 1..44: mol_type = other DNA
aaaatggctccacctgtttatttacacgtgatgtaacatcgctg

SEQ ID NO: 367 - DNA, 44 bp, synthetic construct
  misc_feature 1..44: note = oligonucleotide decoy
  source 1..44: mol_type = other DNA
aaaatggctccacctgtttatttacacgtgatgtaacatcggtg

SEQ ID NO: 368 - DNA, 44 bp, synthetic construct
  misc_feature 1..44: note = oligonucleotide decoy
  source 1..44: mol_type = other DNA
aaaatggctccacctgtttatttacacgtgatgtaacatcgttg

SEQ ID NO: 369 - DNA, 44 bp, synthetic construct
  misc_feature 1..44: note = oligonucleotide decoy
  source 1..44: mol_type = other DNA
aaaatggctccacctgtttgtttacacgtgacataacaacgatg

SEQ ID NO: 370 - DNA, 44 bp, synthetic construct
  misc_feature 1..44: note = oligonucleotide decoy
  source 1..44: mol_type = other DNA
aaaatggctccacctgtttgtttacacgtgacataacaacgctg

SEQ ID NO: 371 - DNA, 44 bp, synthetic construct
  misc_feature 1..44: note = oligonucleotide decoy
  source 1..44: mol_type = other DNA
aaaatggctccacctgtttgtttacacgtgacataacaacggtg

SEQ ID NO: 372 - DNA, 44 bp, synthetic construct
  misc_feature 1..44: note = oligonucleotide decoy
  source 1..44: mol_type = other DNA
aaaatggctccacctgtttgtttacacgtgacataacaacgttg

SEQ ID NO: 373 - DNA, 44 bp, synthetic construct
  misc_feature 1..44: note = oligonucleotide decoy
  source 1..44: mol_type = other DNA
aaaatggctccacctgtttgtttacacgtgacataacaccgatg

SEQ ID NO: 374 - DNA, 44 bp, synthetic construct
  misc_feature 1..44: note = oligonucleotide decoy
  source 1..44: mol_type = other DNA
aaaatggctccacctgtttgtttacacgtgacataacaccgctg

SEQ ID NO: 375 - DNA, 44 bp, synthetic construct
  misc_feature 1..44: note = oligonucleotide decoy
  source 1..44: mol_type = other DNA
aaaatggctccacctgtttgtttacacgtgacataacaccggtg

SEQ ID NO: 376 - DNA, 44 bp, synthetic construct
  misc_feature 1..44: note = oligonucleotide decoy
  source 1..44: mol_type = other DNA
aaaatggctccacctgtttgtttacacgtgacataacaccgttg

SEQ ID NO: 377 - DNA, 44 bp, synthetic construct
  misc_feature 1..44: note = oligonucleotide decoy
  source 1..44: mol_type = other DNA
aaaatggctccacctgtttgtttacacgtgacataacagcgatg

SEQ ID NO: 378 - DNA, 44 bp, synthetic construct
  misc_feature 1..44: note = oligonucleotide decoy
  source 1..44: mol_type = other DNA
aaaatggctccacctgtttgtttacacgtgacataacagcgctg

SEQ ID NO: 379 - DNA, 44 bp, synthetic construct
  misc_feature 1..44: note = oligonucleotide decoy
  source 1..44: mol_type = other DNA
aaaatggctccacctgtttgtttacacgtgacataacagcggtg

SEQ ID NO: 380 - DNA, 44 bp, synthetic construct
  misc_feature 1..44: note = oligonucleotide decoy
  source 1..44: mol_type = other DNA
aaaatggctccacctgtttgtttacacgtgacataacagcgttg

SEQ ID NO: 381 - DNA, 44 bp, synthetic construct
  misc_feature 1..44: note = oligonucleotide decoy
  source 1..44: mol_type = other DNA
aaaatggctccacctgtttgtttacacgtgacataacatcgatg

SEQ ID NO: 382 - DNA, 44 bp, synthetic construct
  misc_feature 1..44: note = oligonucleotide decoy
  source 1..44: mol_type = other DNA
aaaatggctccacctgtttgtttacacgtgacataacatcgctg

SEQ ID NO: 383 - DNA, 44 bp, synthetic construct
  misc_feature 1..44: note = oligonucleotide decoy
  source 1..44: mol_type = other DNA
aaaatggctccacctgtttgtttacacgtgacataacatcggtg

SEQ ID NO: 384 - DNA, 44 bp, synthetic construct
  misc_feature 1..44: note = oligonucleotide decoy
  source 1..44: mol_type = other DNA
aaaatggctccacctgtttgtttacacgtgacataacatcgttg

SEQ ID NO: 385 - DNA, 44 bp, synthetic construct
  misc_feature 1..44: note = oligonucleotide decoy
  source 1..44: mol_type = other DNA
aaaatggctccacctgtttgtttacacgtgacgtaacaacgatg

SEQ ID NO: 386 - DNA, 44 bp, synthetic construct
  misc_feature 1..44: note = oligonucleotide decoy
  source 1..44: mol_type = other DNA
aaaatggctccacctgtttgtttacacgtgacgtaacaacgctg

SEQ ID NO: 387 - DNA, 44 bp, synthetic construct
  misc_feature 1..44: note = oligonucleotide decoy
  source 1..44: mol_type = other DNA
aaaatggctccacctgtttgtttacacgtgacgtaacaacggtg

SEQ ID NO: 388 - DNA, 44 bp, synthetic construct
  misc_feature 1..44: note = oligonucleotide decoy
  source 1..44: mol_type = other DNA
aaaatggctccacctgtttgtttacacgtgacgtaacaacgttg

SEQ ID NO: 389 - DNA, 44 bp, synthetic construct
  misc_feature 1..44: note = oligonucleotide decoy
  source 1..44: mol_type = other DNA
aaaatggctccacctgtttgtttacacgtgacgtaacaccgatg

SEQ ID NO: 390 - DNA, 44 bp, synthetic construct
  misc_feature 1..44: note = oligonucleotide decoy
  source 1..44: mol_type = other DNA
aaaatggctccacctgtttgtttacacgtgacgtaacaccgctg

SEQ ID NO: 391 - DNA, 44 bp, synthetic construct
  misc_feature 1..44: note = oligonucleotide decoy
  source 1..44: mol_type = other DNA
aaaatggctccacctgtttgtttacacgtgacgtaacaccggtg

SEQ ID NO: 392 - DNA, 44 bp, synthetic construct
  misc_feature 1..44: note = oligonucleotide decoy
  source 1..44: mol_type = other DNA
aaaatggctccacctgtttgtttacacgtgacgtaacaccgttg

SEQ ID NO: 393 - DNA, 44 bp, synthetic construct
  misc_feature 1..44: note = oligonucleotide decoy
  source 1..44: mol_type = other DNA
aaaatggctccacctgtttgtttacacgtgacgtaacagcgatg

SEQ ID NO: 394 - DNA, 44 bp, synthetic construct
  misc_feature 1..44: note = oligonucleotide decoy
  source 1..44: mol_type = other DNA
aaaatggctccacctgtttgtttacacgtgacgtaacagcgctg

SEQ ID NO: 395 - DNA, 44 bp, synthetic construct
  misc_feature 1..44: note = oligonucleotide decoy
  source 1..44: mol_type = other DNA
aaaatggctccacctgtttgtttacacgtgacgtaacagcggtg

SEQ ID NO: 396 - DNA, 44 bp, synthetic construct
  misc_feature 1..44: note = oligonucleotide decoy
  source 1..44: mol_type = other DNA
aaaatggctccacctgtttgtttacacgtgacgtaacagcgttg

SEQ ID NO: 397 - DNA, 44 bp, synthetic construct
  misc_feature 1..44: note = oligonucleotide decoy
  source 1..44: mol_type = other DNA
aaaatggctccacctgtttgtttacacgtgacgtaacatcgatg

SEQ ID NO: 398 - DNA, 44 bp, synthetic construct
  misc_feature 1..44: note = oligonucleotide decoy
  source 1..44: mol_type = other DNA
aaaatggctccacctgtttgtttacacgtgacgtaacatcgctg

SEQ ID NO: 399 - DNA, 44 bp, synthetic construct
  misc_feature 1..44: note = oligonucleotide decoy
  source 1..44: mol_type = other DNA
aaaatggctccacctgtttgtttacacgtgacgtaacatcggtg

SEQ ID NO: 400 - DNA, 44 bp, synthetic construct
  misc_feature 1..44: note = oligonucleotide decoy
  source 1..44: mol_type = other DNA
aaaatggctccacctgtttgtttacacgtgacgtaacatcgttg

SEQ ID NO: 401 - DNA, 44 bp, synthetic construct
  misc_feature 1..44: note = oligonucleotide decoy
  source 1..44: mol_type = other DNA
aaaatggctccacctgtttgtttacacgtgatataacaacgatg

SEQ ID NO: 402 - DNA, 44 bp, synthetic construct
  misc_feature 1..44: note = oligonucleotide decoy
  source 1..44: mol_type = other DNA
aaaatggctccacctgtttgtttacacgtgatataacaacgctg

SEQ ID NO: 403 - DNA, 44 bp, synthetic construct
  misc_feature 1..44: note = oligonucleotide decoy
  source 1..44: mol_type = other DNA
aaaatggctccacctgtttgtttacacgtgatataacaacggtg

SEQ ID NO: 404 - DNA, 44 bp, synthetic construct
  misc_feature 1..44: note = oligonucleotide decoy
  source 1..44: mol_type = other DNA
aaaatggctccacctgtttgtttacacgtgatataacaacgttg

SEQ ID NO: 405 - DNA, 44 bp, synthetic construct
  misc_feature 1..44: note = oligonucleotide decoy
  source 1..44: mol_type = other DNA
aaaatggctccacctgtttgtttacacgtgatataacaccgatg

SEQ ID NO: 406 - DNA, 44 bp, synthetic construct
  misc_feature 1..44: note = oligonucleotide decoy
  source 1..44: mol_type = other DNA
aaaatggctccacctgtttgtttacacgtgatataacaccgctg

SEQ ID NO: 407 - DNA, 44 bp, synthetic construct
  misc_feature 1..44: note = oligonucleotide decoy
  source 1..44: mol_type = other DNA
aaaatggctccacctgtttgtttacacgtgatataacaccggtg

SEQ ID NO: 408 - DNA, 44 bp, synthetic construct
  misc_feature 1..44: note = oligonucleotide decoy
  source 1..44: mol_type = other DNA
aaaatggctccacctgtttgtttacacgtgatataacaccgttg

SEQ ID NO: 409 - DNA, 44 bp, synthetic construct
  misc_feature 1..44: note = oligonucleotide decoy
  source 1..44: mol_type = other DNA
aaaatggctccacctgtttgtttacacgtgatataacagcgatg

SEQ ID NO: 410 - DNA, 44 bp, synthetic construct
  misc_feature 1..44: note = oligonucleotide decoy
  source 1..44: mol_type = other DNA
aaaatggctccacctgtttgtttacacgtgatataacagcgctg

SEQ ID NO: 411 - DNA, 44 bp, synthetic construct
  misc_feature 1..44: note = oligonucleotide decoy
  source 1..44: mol_type = other DNA
aaaatggctccacctgtttgtttacacgtgatataacagcggtg

SEQ ID NO: 412 - DNA, 44 bp, synthetic construct
  misc_feature 1..44: note = oligonucleotide decoy
  source 1..44: mol_type = other DNA
aaaatggctccacctgtttgtttacacgtgatataacagcgttg

SEQ ID NO: 413 - DNA, 44 bp, synthetic construct
  misc_feature 1..44: note = oligonucleotide decoy
  source 1..44: mol_type = other DNA
aaaatggctccacctgtttgtttacacgtgatataacatcgatg

SEQ ID NO: 414 - DNA, 44 bp, synthetic construct
  misc_feature 1..44: note = oligonucleotide decoy
  source 1..44: mol_type = other DNA
aaaatggctccacctgtttgtttacacgtgatataacatcgctg

SEQ ID NO: 415 - DNA, 44 bp, synthetic construct
  misc_feature 1..44: note = oligonucleotide decoy
  source 1..44: mol_type = other DNA
aaaatggctccacctgtttgtttacacgtgatataacatcggtg

SEQ ID NO: 416 - DNA, 44 bp, synthetic construct
  misc_feature 1..44: note = oligonucleotide decoy
  source 1..44: mol_type = other DNA
aaaatggctccacctgtttgtttacacgtgatataacatcgttg

SEQ ID NO: 417 - DNA, 44 bp, synthetic construct
  misc_feature 1..44: note = oligonucleotide decoy
  source 1..44: mol_type = other DNA
aaaatggctccacctgtttgtttacacgtgatgtaacaacgatg

SEQ ID NO: 418 - DNA, 44 bp, synthetic construct
  misc_feature 1..44: note = oligonucleotide decoy
  source 1..44: mol_type = other DNA
aaaatggctccacctgtttgtttacacgtgatgtaacaacgctg

SEQ ID NO: 419 - DNA, 44 bp, synthetic construct
  misc_feature 1..44: note = oligonucleotide decoy
  source 1..44: mol_type = other DNA
aaaatggctccacctgtttgtttacacgtgatgtaacaacggtg

SEQ ID NO: 420 - DNA, 44 bp, synthetic construct
  misc_feature 1..44: note = oligonucleotide decoy
  source 1..44: mol_type = other DNA
aaaatggctccacctgtttgtttacacgtgatgtaacaacgttg

SEQ ID NO: 421 - DNA, 44 bp, synthetic construct
  misc_feature 1..44: note = oligonucleotide decoy
  source 1..44: mol_type = other DNA
aaaatggctccacctgtttgtttacacgtgatgtaacaccgatg

SEQ ID NO: 422 - DNA, 44 bp, synthetic construct
  misc_feature 1..44: note = oligonucleotide decoy
  source 1..44: mol_type = other DNA
aaaatggctccacctgtttgtttacacgtgatgtaacaccgctg

SEQ ID NO: 423 - DNA, 44 bp, synthetic construct
  misc_feature 1..44: note = oligonucleotide decoy
  source 1..44: mol_type = other DNA
aaaatggctccacctgtttgtttacacgtgatgtaacaccggtg

SEQ ID NO: 424 - DNA, 44 bp, synthetic construct
  misc_feature 1..44: note = oligonucleotide decoy
  source 1..44: mol_type = other DNA
aaaatggctccacctgtttgtttacacgtgatgtaacaccgttg

SEQ ID NO: 425 - DNA, 44 bp, synthetic construct
  misc_feature 1..44: note = oligonucleotide decoy
  source 1..44: mol_type = other DNA
aaaatggctccacctgtttgtttacacgtgatgtaacagcgatg

SEQ ID NO: 426 - DNA, 44 bp, synthetic construct
  misc_feature 1..44: note = oligonucleotide decoy
  source 1..44: mol_type = other DNA
aaaatggctccacctgtttgtttacacgtgatgtaacagcgctg

SEQ ID NO: 427 - DNA, 44 bp, synthetic construct
  misc_feature 1..44: note = oligonucleotide decoy
  source 1..44: mol_type = other DNA
aaaatggctccacctgtttgtttacacgtgatgtaacagcggtg

SEQ ID NO: 428 - DNA, 44 bp, synthetic construct
  misc_feature 1..44: note = oligonucleotide decoy
  source 1..44: mol_type = other DNA
aaaatggctccacctgtttgtttacacgtgatgtaacagcgttg

SEQ ID NO: 429 - DNA, 44 bp, synthetic construct
  misc_feature 1..44: note = oligonucleotide decoy
  source 1..44: mol_type = other DNA
aaaatggctccacctgtttgtttacacgtgatgtaacatcgatg

SEQ ID NO: 430 - DNA, 44 bp, synthetic construct
  misc_feature 1..44: note = oligonucleotide decoy
  source 1..44: mol_type = other DNA
aaaatggctccacctgtttgtttacacgtgatgtaacatcgctg

SEQ ID NO: 431 - DNA, 44 bp, synthetic construct
  misc_feature 1..44: note = oligonucleotide decoy
  source 1..44: mol_type = other DNA
aaaatggctccacctgtttgtttacacgtgatgtaacatcggtg

SEQ ID NO: 432 - DNA, 44 bp, synthetic construct
  misc_feature 1..44: note = oligonucleotide decoy
  source 1..44: mol_type = other DNA
aaaatggctccacctgtttgtttacacgtgatgtaacatcgttg

SEQ ID NO: 433 - DNA, 44 bp, synthetic construct
  misc_feature 1..44: note = oligonucleotide decoy
  source 1..44: mol_type = other DNA
aagatggctccacctgtttatttacacgtgttacatcaccgatg

SEQ ID NO: 434 - DNA, 44 bp, synthetic construct
  misc_feature 1..44: note = oligonucleotide decoy
  source 1..44: mol_type = other DNA
aagatggctccacctgtttatttacacgtgttacatcaccgctg

SEQ ID NO: 435 - DNA, 44 bp, synthetic construct
  misc_feature 1..44: note = oligonucleotide decoy
  source 1..44: mol_type = other DNA
aagatggctccacctgtttatttacacgtgttacatcaccggtg

SEQ ID NO: 436 - DNA, 44 bp, synthetic construct
  misc_feature 1..44: note = oligonucleotide decoy
  source 1..44: mol_type = other DNA
aagatggctccacctgtttatttacacgtgttacatcaccgttg

SEQ ID NO: 437 - DNA, 44 bp, synthetic construct
  misc_feature 1..44: note = oligonucleotide decoy
  source 1..44: mol_type = other DNA
aagatggctccacctgtttatttacacgtgttacatcatcgatg

SEQ ID NO: 438 - DNA, 44 bp, synthetic construct
  misc_feature 1..44: note = oligonucleotide decoy
  source 1..44: mol_type = other DNA
aagatggctccacctgtttatttacacgtgttacatcatcgctg

SEQ ID NO: 439 - DNA, 44 bp, synthetic construct
  misc_feature 1..44: note = oligonucleotide decoy
  source 1..44: mol_type = other DNA
aagatggctccacctgtttatttacacgtgttacatcatcggtg

SEQ ID NO: 440 - DNA, 44 bp, synthetic construct
  misc_feature 1..44: note = oligonucleotide decoy
  source 1..44: mol_type = other DNA
aagatggctccacctgtttatttacacgtgttacatcatcgttg

SEQ ID NO: 441 - DNA, 44 bp, synthetic construct
  misc_feature 1..44: note = oligonucleotide decoy
  source 1..44: mol_type = other DNA
aagatggctccacctgtttatttacacgtgttacgtcaccgatg

SEQ ID NO: 442 - DNA, 44 bp, synthetic construct
  misc_feature 1..44: note = oligonucleotide decoy
  source 1..44: mol_type = other DNA
aagatggctccacctgtttatttacacgtgttacgtcaccgctg

SEQ ID NO: 443 - DNA, 44 bp, synthetic construct
  misc_feature 1..44: note = oligonucleotide decoy
  source 1..44: mol_type = other DNA
aagatggctccacctgtttatttacacgtgttacgtcaccggtg

SEQ ID NO: 444 - DNA, 44 bp, synthetic construct
  misc_feature 1..44: note = oligonucleotide decoy
  source 1..44: mol_type = other DNA
aagatggctccacctgtttatttacacgtgttacgtcaccgttg

SEQ ID NO: 445 - DNA, 44 bp, synthetic construct
  misc_feature 1..44: note = oligonucleotide decoy
  source 1..44: mol_type = other DNA
aagatggctccacctgtttatttacacgtgttacgtcatcgatg

SEQ ID NO: 446 - DNA, 44 bp, synthetic construct
  misc_feature 1..44: note = oligonucleotide decoy
  source 1..44: mol_type = other DNA
aagatggctccacctgtttatttacacgtgttacgtcatcgctg

SEQ ID NO: 447 - DNA, 44 bp, synthetic construct
  misc_feature 1..44: note = oligonucleotide decoy
  source 1..44: mol_type = other DNA
aagatggctccacctgtttatttacacgtgttacgtcatcggtg

SEQ ID NO: 448 - DNA, 44 bp, synthetic construct
  misc_feature 1..44: note = oligonucleotide decoy
  source 1..44: mol_type = other DNA
aagatggctccacctgtttatttacacgtgttacgtcatcgttg

SEQ ID NO: 449 - DNA, 44 bp, synthetic construct
  misc_feature 1..44: note = oligonucleotide decoy
  source 1..44: mol_type = other DNA
aagatggctccacctgtttatttacacgtgttatatcaccgatg

SEQ ID NO: 450 - DNA, 44 bp, synthetic construct
  misc_feature 1..44: note = oligonucleotide decoy
  source 1..44: mol_type = other DNA
aagatggctccacctgtttatttacacgtgttatatcaccgctg

SEQ ID NO: 451 - DNA, 44 bp, synthetic construct
  misc_feature 1..44: note = oligonucleotide decoy
  source 1..44: mol_type = other DNA
aagatggctccacctgtttatttacacgtgttatatcaccggtg

SEQ ID NO: 452 - DNA, 44 bp, synthetic construct
  misc_feature 1..44: note = oligonucleotide decoy
  source 1..44: mol_type = other DNA
aagatggctccacctgtttatttacacgtgttatatcaccgttg

SEQ ID NO: 453 - DNA, 44 bp, synthetic construct
  misc_feature 1..44: note = oligonucleotide decoy
  source 1..44: mol_type = other DNA
aagatggctccacctgtttatttacacgtgttatatcatcgatg

SEQ ID NO: 454 - DNA, 44 bp, synthetic construct
  misc_feature 1..44: note = oligonucleotide decoy
  source 1..44: mol_type = other DNA
aagatggctccacctgtttatttacacgtgttatatcatcgctg

SEQ ID NO: 455 - DNA, 44 bp, synthetic construct
  misc_feature 1..44: note = oligonucleotide decoy
  source 1..44: mol_type = other DNA
aagatggctccacctgtttatttacacgtgttatatcatcggtg

SEQ ID NO: 456 - DNA, 44 bp, synthetic construct
  misc_feature 1..44: note = oligonucleotide decoy
  source 1..44: mol_type = other DNA
aagatggctccacctgtttatttacacgtgttatatcatcgttg

SEQ ID NO: 457 - DNA, 44 bp, synthetic construct
  misc_feature 1..44: note = oligonucleotide decoy
  source 1..44: mol_type = other DNA
aagatggctccacctgtttatttacacgtgttatgtcaccgatg

SEQ ID NO: 458 - DNA, 44 bp, synthetic construct
  misc_feature 1..44: note = oligonucleotide decoy
  source 1..44: mol_type = other DNA
aagatggctccacctgtttatttacacgtgttatgtcaccgctg

SEQ ID NO: 459 - DNA, 44 bp, synthetic construct
  misc_feature 1..44: note = oligonucleotide decoy
  source 1..44: mol_type = other DNA
aagatggctccacctgtttatttacacgtgttatgtcaccggtg

SEQ ID NO: 460 - DNA, 44 bp, synthetic construct
  misc_feature 1..44: note = oligonucleotide decoy
  source 1..44: mol_type = other DNA
aagatggctccacctgtttatttacacgtgttatgtcaccgttg

SEQ ID NO: 461 - DNA, 44 bp, synthetic construct
  misc_feature 1..44: note = oligonucleotide decoy
  source 1..44: mol_type = other DNA
aagatggctccacctgtttatttacacgtgttatgtcatcgatg

SEQ ID NO: 462 - DNA, 44 bp, synthetic construct
  misc_feature 1..44: note = oligonucleotide decoy
  source 1..44: mol_type = other DNA
aagatggctccacctgtttatttacacgtgttatgtcatcgctg

SEQ ID NO: 463 - DNA, 44 bp, synthetic construct
  misc_feature 1..44: note = oligonucleotide decoy
  source 1..44: mol_type = other DNA
aagatggctccacctgtttatttacacgtgttatgtcatcggtg

SEQ ID NO: 464 - DNA, 44 bp, synthetic construct
  misc_feature 1..44: note = oligonucleotide decoy
  source 1..44: mol_type = other DNA
aagatggctccacctgtttatttacacgtgttatgtcatcgttg

SEQ ID NO: 465 - DNA, 44 bp, synthetic construct
  misc_feature 1..44: note = oligonucleotide decoy
  source 1..44: mol_type = other DNA
aagatggctccacctgtttgtttacacgtgttacatcaccgatg

SEQ ID NO: 466 - DNA, 44 bp, synthetic construct
  misc_feature 1..44: note = oligonucleotide decoy
  source 1..44: mol_type = other DNA
aagatggctccacctgtttgtttacacgtgttacatcaccgctg

SEQ ID NO: 467 - DNA, 44 bp, synthetic construct
  misc_feature 1..44: note = oligonucleotide decoy
  source 1..44: mol_type = other DNA
aagatggctccacctgtttgtttacacgtgttacatcaccggtg

SEQ ID NO: 468 - DNA, 44 bp, synthetic construct
  misc_feature 1..44: note = oligonucleotide decoy
  source 1..44: mol_type = other DNA
aagatggctccacctgtttgtttacacgtgttacatcaccgttg

SEQ ID NO: 469 - DNA, 44 bp, synthetic construct
  misc_feature 1..44: note = oligonucleotide decoy
  source 1..44: mol_type = other DNA
aagatggctccacctgtttgtttacacgtgttacatcatcgatg

SEQ ID NO: 470 - DNA, 44 bp, synthetic construct
  misc_feature 1..44: note = oligonucleotide decoy
  source 1..44: mol_type = other DNA
aagatggctccacctgtttgtttacacgtgttacatcatcgctg

SEQ ID NO: 471 - DNA, 44 bp, synthetic construct
  misc_feature 1..44: note = oligonucleotide decoy
  source 1..44: mol_type = other DNA
aagatggctccacctgtttgtttacacgtgttacatcatcggtg

SEQ ID NO: 472 - DNA, 44 bp, synthetic construct
  misc_feature 1..44: note = oligonucleotide decoy
  source 1..44: mol_type = other DNA
aagatggctccacctgtttgtttacacgtgttacatcatcgttg

SEQ ID NO: 473 - DNA, 44 bp, synthetic construct
  misc_feature 1..44: note = oligonucleotide decoy
  source 1..44: mol_type = other DNA
aagatggctccacctgtttgtttacacgtgttacgtcaccgatg

SEQ ID NO: 474 - DNA, 44 bp, synthetic construct
  misc_feature 1..44: note = oligonucleotide decoy
  source 1..44: mol_type = other DNA
aagatggctccacctgtttgtttacacgtgttacgtcaccgctg

SEQ ID NO: 475 - DNA, 44 bp, synthetic construct
  misc_feature 1..44: note = oligonucleotide decoy
  source 1..44: mol_type = other DNA
aagatggctccacctgtttgtttacacgtgttacgtcaccggtg

SEQ ID NO: 476 - DNA, 44 bp, synthetic construct
  misc_feature 1..44: note = oligonucleotide decoy
  source 1..44: mol_type = other DNA
aagatggctccacctgtttgtttacacgtgttacgtcaccgttg

SEQ ID NO: 477 - DNA, 44 bp, synthetic construct
  misc_feature 1..44: note = oligonucleotide decoy
  source 1..44: mol_type = other DNA
aagatggctccacctgtttgtttacacgtgttacgtcatcgatg

SEQ ID NO: 478 - DNA, 44 bp, synthetic construct
  misc_feature 1..44: note = oligonucleotide decoy
  source 1..44: mol_type = other DNA
aagatggctccacctgtttgtttacacgtgttacgtcatcgctg

SEQ ID NO: 479 - DNA, 44 bp, synthetic construct
  misc_feature 1..44: note = oligonucleotide decoy
  source 1..44: mol_type = other DNA
aagatggctccacctgtttgtttacacgtgttacgtcatcggtg

SEQ ID NO: 480 - DNA, 44 bp, synthetic construct
  misc_feature 1..44: note = oligonucleotide decoy
  source 1..44: mol_type = other DNA
aagatggctccacctgtttgtttacacgtgttacgtcatcgttg

SEQ ID NO: 481 - DNA, 44 bp, synthetic construct
  misc_feature 1..44: note = oligonucleotide decoy
  source 1..44: mol_type = other DNA
aagatggctccacctgtttgtttacacgtgttatatcaccgatg

SEQ ID NO: 482 - DNA, 44 bp, synthetic construct
  misc_feature 1..44: note = oligonucleotide decoy
  source 1..44: mol_type = other DNA
aagatggctccacctgtttgtttacacgtgttatatcaccgctg

SEQ ID NO: 483 - DNA, 44 bp, synthetic construct
  misc_feature 1..44: note = oligonucleotide decoy
  source 1..44: mol_type = other DNA
aagatggctccacctgtttgtttacacgtgttatatcaccggtg

SEQ ID NO: 484 - DNA, 44 bp, synthetic construct
  misc_feature 1..44: note = oligonucleotide decoy
  source 1..44: mol_type = other DNA
aagatggctccacctgtttgtttacacgtgttatatcaccgttg

SEQ ID NO: 485 - DNA, 44 bp, synthetic construct
  misc_feature 1..44: note = oligonucleotide decoy
  source 1..44: mol_type = other DNA
aagatggctccacctgtttgtttacacgtgttatatcatcgatg

SEQ ID NO: 486 - DNA, 44 bp, synthetic construct
  misc_feature 1..44: note = oligonucleotide decoy
  source 1..44: mol_type = other DNA
aagatggctccacctgtttgtttacacgtgttatatcatcgctg

SEQ ID NO: 487 - DNA, 44 bp, synthetic construct
  misc_feature 1..44: note = oligonucleotide decoy
  source 1..44: mol_type = other DNA
aagatggctccacctgtttgtttacacgtgttatatcatcggtg

SEQ ID NO: 488 - DNA, 44 bp, synthetic construct
  misc_feature 1..44: note = oligonucleotide decoy
  source 1..44: mol_type = other DNA
aagatggctccacctgtttgtttacacgtgttatatcatcgttg

SEQ ID NO: 489 - DNA, 44 bp, synthetic construct
  misc_feature 1..44: note = oligonucleotide decoy
  source 1..44: mol_type = other DNA
aagatggctccacctgtttgtttacacgtgttatgtcaccgatg

SEQ ID NO: 490 - DNA, 44 bp, synthetic construct
  misc_feature 1..44: note = oligonucleotide decoy
  source 1..44: mol_type = other DNA
aagatggctccacctgtttgtttacacgtgttatgtcaccgctg

SEQ ID NO: 491 - DNA, 44 bp, synthetic construct
  misc_feature 1..44: note = oligonucleotide decoy
  source 1..44: mol_type = other DNA
aagatggctccacctgtttgtttacacgtgttatgtcaccggtg

SEQ ID NO: 492 - DNA, 44 bp, synthetic construct
  misc_feature 1..44: note = oligonucleotide decoy
  source 1..44: mol_type = other DNA
aagatggctccacctgtttgtttacacgtgttatgtcaccgttg

SEQ ID NO: 493 - DNA, 44 bp, synthetic construct
  misc_feature 1..44: note = oligonucleotide decoy
  source 1..44: mol_type = other DNA
aagatggctccacctgtttgtttacacgtgttatgtcatcgatg

SEQ ID NO: 494 - DNA, 44 bp, synthetic construct
  misc_feature 1..44: note = oligonucleotide decoy
  source 1..44: mol_type = other DNA
aagatggctccacctgtttgtttacacgtgttatgtcatcgctg

SEQ ID NO: 495 - DNA, 44 bp, synthetic construct
  misc_feature 1..44: note = oligonucleotide decoy
  source 1..44: mol_type = other DNA
aagatggctccacctgtttgtttacacgtgttatgtcatcggtg

SEQ ID NO: 496 - DNA, 44 bp, synthetic construct
  misc_feature 1..44: note = oligonucleotide decoy
  source 1..44: mol_type = other DNA
aagatggctccacctgtttgtttacacgtgttatgtcatcgttg

SEQ ID NO: 497 - DNA, 44 bp, synthetic construct
  misc_feature 1..44: note = oligonucleotide decoy
  source 1..44: mol_type = other DNA
aaaatggctccacctgtttatttacacgtgttacatcaccgatg

SEQ ID NO: 498 - DNA, 44 bp, synthetic construct
  misc_feature 1..44: note = oligonucleotide decoy
  source 1..44: mol_type = other DNA
aaaatggctccacctgtttatttacacgtgttacatcaccgctg

SEQ ID NO: 499 - DNA, 44 bp, synthetic construct
  misc_feature 1..44: note = oligonucleotide decoy
  source 1..44: mol_type = other DNA
aaaatggctccacctgtttatttacacgtgttacatcaccggtg

SEQ ID NO: 500 - DNA, 44 bp, synthetic construct
  misc_feature 1..44: note = oligonucleotide decoy
  source 1..44: mol_type = other DNA
aaaatggctccacctgtttatttacacgtgttacatcaccgttg

SEQ ID NO: 501 - DNA, 44 bp, synthetic construct
  misc_feature 1..44: note = oligonucleotide decoy
  source 1..44: mol_type = other DNA
aaaatggctccacctgtttatttacacgtgttacatcatcgatg

SEQ ID NO: 502 - DNA, 44 bp, synthetic construct
  misc_feature 1..44: note = oligonucleotide decoy
  source 1..44: mol_type = other DNA
aaaatggctccacctgtttatttacacgtgttacatcatcgctg

SEQ ID NO: 503 - DNA, 44 bp, synthetic construct
  misc_feature 1..44: note = oligonucleotide decoy
  source 1..44: mol_type = other DNA
aaaatggctccacctgtttatttacacgtgttacatcatcggtg

SEQ ID NO: 504 - DNA, 44 bp, synthetic construct
  misc_feature 1..44: note = oligonucleotide decoy
  source 1..44: mol_type = other DNA
aaaatggctccacctgtttatttacacgtgttacatcatcgttg

SEQ ID NO: 505 - DNA, 44 bp, synthetic construct
  misc_feature 1..44: note = oligonucleotide decoy
  source 1..44: mol_type = other DNA
aaaatggctccacctgtttatttacacgtgttacgtcaccgatg

SEQ ID NO: 506 - DNA, 44 bp, synthetic construct
  misc_feature 1..44: note = oligonucleotide decoy
  source 1..44: mol_type = other DNA
aaaatggctccacctgtttatttacacgtgttacgtcaccgctg

SEQ ID NO: 507 - DNA, 44 bp, synthetic construct
  misc_feature 1..44: note = oligonucleotide decoy
  source 1..44: mol_type = other DNA
aaaatggctccacctgtttatttacacgtgttacgtcaccggtg

SEQ ID NO: 508 - DNA, 44 bp, synthetic construct
  misc_feature 1..44: note = oligonucleotide decoy
  source 1..44: mol_type = other DNA
aaaatggctccacctgtttatttacacgtgttacgtcaccgttg

SEQ ID NO: 509 - DNA, 44 bp, synthetic construct
  misc_feature 1..44: note = oligonucleotide decoy
  source 1..44: mol_type = other DNA
aaaatggctccacctgtttatttacacgtgttacgtcatcgatg

SEQ ID NO: 510 - DNA, 44 bp, synthetic construct
  misc_feature 1..44: note = oligonucleotide decoy
  source 1..44: mol_type = other DNA
aaaatggctccacctgtttatttacacgtgttacgtcatcgctg

SEQ ID NO: 511 - DNA, 44 bp, synthetic construct
  misc_feature 1..44: note = oligonucleotide decoy
  source 1..44: mol_type = other DNA
aaaatggctccacctgtttatttacacgtgttacgtcatcggtg

SEQ ID NO: 512 - DNA, 44 bp, synthetic construct
  misc_feature 1..44: note = oligonucleotide decoy
  source 1..44: mol_type = other DNA
aaaatggctccacctgtttatttacacgtgttacgtcatcgttg

SEQ ID NO: 513 - DNA, 44 bp, synthetic construct
  misc_feature 1..44: note = oligonucleotide decoy
  source 1..44: mol_type = other DNA
aaaatggctccacctgtttatttacacgtgttatatcaccgatg

SEQ ID NO: 514 - DNA, 44 bp, synthetic construct
  misc_feature 1..44: note = oligonucleotide decoy
  source 1..44: mol_type = other DNA
aaaatggctccacctgtttatttacacgtgttatatcaccgctg

SEQ ID NO: 515 - DNA, 44 bp, synthetic construct
  misc_feature 1..44: note = oligonucleotide decoy
  source 1..44: mol_type = other DNA
aaaatggctccacctgtttatttacacgtgttatatcaccggtg

SEQ ID NO: 516 - DNA, 44 bp, synthetic construct
  misc_feature 1..44: note = oligonucleotide decoy
  source 1..44: mol_type = other DNA
aaaatggctccacctgtttatttacacgtgttatatcaccgttg

SEQ ID NO: 517 - DNA, 44 bp, synthetic construct
  misc_feature 1..44: note = oligonucleotide decoy
  source 1..44: mol_type = other DNA
aaaatggctccacctgtttatttacacgtgttatatcatcgatg

SEQ ID NO: 518 - DNA, 44 bp, synthetic construct
  misc_feature 1..44: note = oligonucleotide decoy
  source 1..44: mol_type = other DNA
aaaatggctccacctgtttatttacacgtgttatatcatcgctg

SEQ ID NO: 519 - DNA, 44 bp, synthetic construct
  misc_feature 1..44: note = oligonucleotide decoy
  source 1..44: mol_type = other DNA
aaaatggctccacctgtttatttacacgtgttatatcatcggtg

SEQ ID NO: 520 - DNA, 44 bp, synthetic construct
  misc_feature 1..44: note = oligonucleotide decoy
  source 1..44: mol_type = other DNA
aaaatggctccacctgtttatttacacgtgttatatcatcgttg

SEQ ID NO: 521 - DNA, 44 bp, synthetic construct
  misc_feature 1..44: note = oligonucleotide decoy
  source 1..44: mol_type = other DNA
aaaatggctccacctgtttatttacacgtgttatgtcaccgatg

SEQ ID NO: 522 - DNA, 44 bp, synthetic construct
  misc_feature 1..44: note = oligonucleotide decoy
  source 1..44: mol_type = other DNA
aaaatggctccacctgtttatttacacgtgttatgtcaccgctg

SEQ ID NO: 523 - DNA, 44 bp, synthetic construct
  misc_feature 1..44: note = oligonucleotide decoy
  source 1..44: mol_type = other DNA
aaaatggctccacctgtttatttacacgtgttatgtcaccggtg

SEQ ID NO: 524 - DNA, 44 bp, synthetic construct
  misc_feature 1..44: note = oligonucleotide decoy
  source 1..44: mol_type = other DNA
aaaatggctccacctgtttatttacacgtgttatgtcaccgttg

SEQ ID NO: 525 - DNA, 44 bp, synthetic construct
  misc_feature 1..44: note = oligonucleotide decoy
  source 1..44: mol_type = other DNA
aaaatggctccacctgtttatttacacgtgttatgtcatcgatg

SEQ ID NO: 526 - DNA, 44 bp, synthetic construct
  misc_feature 1..44: note = oligonucleotide decoy
  source 1..44: mol_type = other DNA
aaaatggctccacctgtttatttacacgtgttatgtcatcgctg

SEQ ID NO: 527 - DNA, 44 bp, synthetic construct
  misc_feature 1..44: note = oligonucleotide decoy
  source 1..44: mol_type = other DNA
aaaatggctccacctgtttatttacacgtgttatgtcatcggtg

SEQ ID NO: 528 - DNA, 44 bp, synthetic construct
  misc_feature 1..44: note = oligonucleotide decoy
  source 1..44: mol_type = other DNA
aaaatggctccacctgtttatttacacgtgttatgtcatcgttg

SEQ ID NO: 529 - DNA, 44 bp, synthetic construct
  misc_feature 1..44: note = oligonucleotide decoy
  source 1..44: mol_type = other DNA
aaaatggctccacctgtttgtttacacgtgttacatcaccgatg

SEQ ID NO: 530 - DNA, 44 bp, synthetic construct
  misc_feature 1..44: note = oligonucleotide decoy
  source 1..44: mol_type = other DNA
aaaatggctccacctgtttgtttacacgtgttacatcaccgctg

SEQ ID NO: 531 - DNA, 44 bp, synthetic construct
  misc_feature 1..44: note = oligonucleotide decoy
  source 1..44: mol_type = other DNA
aaaatggctccacctgtttgtttacacgtgttacatcaccggtg

SEQ ID NO: 532 - DNA, 44 bp, synthetic construct
  misc_feature 1..44: note = oligonucleotide decoy
  source 1..44: mol_type = other DNA
aaaatggctccacctgtttgtttacacgtgttacatcaccgttg

SEQ ID NO: 533 - DNA, 44 bp, synthetic construct
  misc_feature 1..44: note = oligonucleotide decoy
  source 1..44: mol_type = other DNA
aaaatggctccacctgtttgtttacacgtgttacatcatcgatg

SEQ ID NO: 534 - DNA, 44 bp, synthetic construct
  misc_feature 1..44: note = oligonucleotide decoy
  source 1..44: mol_type = other DNA
aaaatggctccacctgtttgtttacacgtgttacatcatcgctg

SEQ ID NO: 535 - DNA, 44 bp, synthetic construct
  misc_feature 1..44: note = oligonucleotide decoy
  source 1..44: mol_type = other DNA
aaaatggctccacctgtttgtttacacgtgttacatcatcggtg

SEQ ID NO: 536 - DNA, 44 bp, synthetic construct
  misc_feature 1..44: note = oligonucleotide decoy
  source 1..44: mol_type = other DNA
aaaatggctccacctgtttgtttacacgtgttacatcatcgttg

SEQ ID NO: 537 - DNA, 44 bp, synthetic construct
  misc_feature 1..44: note = oligonucleotide decoy
  source 1..44: mol_type = other DNA
aaaatggctccacctgtttgtttacacgtgttacgtcaccgatg

SEQ ID NO: 538 - DNA, 44 bp, synthetic construct
  misc_feature 1..44: note = oligonucleotide decoy
  source 1..44: mol_type = other DNA
aaaatggctccacctgtttgtttacacgtgttacgtcaccgctg

SEQ ID NO: 539 - DNA, 44 bp, synthetic construct
  misc_feature 1..44: note = oligonucleotide decoy
  source 1..44: mol_type = other DNA
aaaatggctccacctgtttgtttacacgtgttacgtcaccggtg

SEQ ID NO: 540 - DNA, 44 bp, synthetic construct
  misc_feature 1..44: note = oligonucleotide decoy
  source 1..44: mol_type = other DNA
aaaatggctccacctgtttgtttacacgtgttacgtcaccgttg

SEQ ID NO: 541 - DNA, 44 bp, synthetic construct
  misc_feature 1..44: note = oligonucleotide decoy
  source 1..44: mol_type = other DNA
aaaatggctccacctgtttgtttacacgtgttacgtcatcgatg

SEQ ID NO: 542 - DNA, 44 bp, synthetic construct
  misc_feature 1..44: note = oligonucleotide decoy
  source 1..44: mol_type = other DNA
aaaatggctccacctgtttgtttacacgtgttacgtcatcgctg

SEQ ID NO: 543 - DNA, 44 bp, synthetic construct
  misc_feature 1..44: note = oligonucleotide decoy
  source 1..44: mol_type = other DNA
aaaatggctccacctgtttgtttacacgtgttacgtcatcggtg

SEQ ID NO: 544 - DNA, 44 bp, synthetic construct
  misc_feature 1..44: note = oligonucleotide decoy
  source 1..44: mol_type = other DNA
aaaatggctccacctgtttgtttacacgtgttacgtcatcgttg

SEQ ID NO: 545 - DNA, 44 bp, synthetic construct
  misc_feature 1..44: note = oligonucleotide decoy
  source 1..44: mol_type = other DNA
aaaatggctccacctgtttgtttacacgtgttatatcaccgatg

SEQ ID NO: 546 - DNA, 44 bp, synthetic construct
  misc_feature 1..44: note = oligonucleotide decoy
  source 1..44: mol_type = other DNA
aaaatggctccacctgtttgtttacacgtgttatatcaccgctg

SEQ ID NO: 547 - DNA, 44 bp, synthetic construct
  misc_feature 1..44: note = oligonucleotide decoy
  source 1..44: mol_type = other DNA
aaaatggctccacctgtttgtttacacgtgttatatcaccggtg

SEQ ID NO: 548 - DNA, 44 bp, synthetic construct
  misc_feature 1..44: note = oligonucleotide decoy
  source 1..44: mol_type = other DNA
aaaatggctccacctgtttgtttacacgtgttatatcaccgttg

SEQ ID NO: 549 - DNA, 44 bp, synthetic construct
  misc_feature 1..44: note = oligonucleotide decoy
  source 1..44: mol_type = other DNA
aaaatggctccacctgtttgtttacacgtgttatatcatcgatg

SEQ ID NO: 550 - DNA, 44 bp, synthetic construct
  misc_feature 1..44: note = oligonucleotide decoy
  source 1..44: mol_type = other DNA
aaaatggctccacctgtttgtttacacgtgttatatcatcgctg

SEQ ID NO: 551 - DNA, 44 bp, synthetic construct
  misc_feature 1..44: note = oligonucleotide decoy
  source 1..44: mol_type = other DNA
aaaatggctccacctgtttgtttacacgtgttatatcatcggtg

SEQ ID NO: 552 - DNA, 44 bp, synthetic construct
  misc_feature 1..44: note = oligonucleotide decoy
  source 1..44: mol_type = other DNA
aaaatggctccacctgtttgtttacacgtgttatatcatcgttg

SEQ ID NO: 553 - DNA, 44 bp, synthetic construct
  misc_feature 1..44: note = oligonucleotide decoy
  source 1..44: mol_type = other DNA
aaaatggctccacctgtttgtttacacgtgttatgtcaccgatg

SEQ ID NO: 554 - DNA, 44 bp, synthetic construct
  misc_feature 1..44: note = oligonucleotide decoy
  source 1..44: mol_type = other DNA
aaaatggctccacctgtttgtttacacgtgttatgtcaccgctg

SEQ ID NO: 555 - DNA, 44 bp, synthetic construct
  misc_feature 1..44: note = oligonucleotide decoy
  source 1..44: mol_type = other DNA
aaaatggctccacctgtttgtttacacgtgttatgtcaccggtg

SEQ ID NO: 556 - DNA, 44 bp, synthetic construct
  misc_feature 1..44: note = oligonucleotide decoy
  source 1..44: mol_type = other DNA
aaaatggctccacctgtttgtttacacgtgttatgtcaccgttg

SEQ ID NO: 557 - DNA, 44 bp, synthetic construct
  misc_feature 1..44: note = oligonucleotide decoy
  source 1..44: mol_type = other DNA
aaaatggctccacctgtttgtttacacgtgttatgtcatcgatg

SEQ ID NO: 558 - DNA, 44 bp, synthetic construct
  misc_feature 1..44: note = oligonucleotide decoy
  source 1..44: mol_type = other DNA
aaaatggctccacctgtttgtttacacgtgttatgtcatcgctg

SEQ ID NO: 559 - DNA, 44 bp, synthetic construct
  misc_feature 1..44: note = oligonucleotide decoy
  source 1..44: mol_type = other DNA
aaaatggctccacctgtttgtttacacgtgttatgtcatcggtg

SEQ ID NO: 560 - DNA, 44 bp, synthetic construct
  misc_feature 1..44: note = oligonucleotide decoy
  source 1..44: mol_type = other DNA
aaaatggctccacctgtttgtttacacgtgttatgtcatcgttg

SEQ ID NO: 561 - DNA, 44 bp, synthetic construct
  misc_feature 1..44: note = oligonucleotide decoy
  source 1..44: mol_type = other DNA
aagatggctccacctgttacatcacgtgtaaacaaacaacgatg

SEQ ID NO: 562 - DNA, 44 bp, synthetic construct
  misc_feature 1..44: note = oligonucleotide decoy
  source 1..44: mol_type = other DNA
aagatggctccacctgttacatcacgtgtaaacaaacaacgctg

SEQ ID NO: 563 - DNA, 44 bp, synthetic construct
  misc_feature 1..44: note = oligonucleotide decoy
  source 1..44: mol_type = other DNA
aagatggctccacctgttacatcacgtgtaaacaaacaacggtg

SEQ ID NO: 564 - DNA, 44 bp, synthetic construct
  misc_feature 1..44: note = oligonucleotide decoy
  source 1..44: mol_type = other DNA
aagatggctccacctgttacatcacgtgtaaacaaacaacgttg

SEQ ID NO: 565 - DNA, 44 bp, synthetic construct
  misc_feature 1..44: note = oligonucleotide decoy
  source 1..44: mol_type = other DNA
aagatggctccacctgttacatcacgtgtaaacaaacaccgatg

SEQ ID NO: 566 - DNA, 44 bp, synthetic construct
  misc_feature 1..44: note = oligonucleotide decoy
  source 1..44: mol_type = other DNA
aagatggctccacctgttacatcacgtgtaaacaaacaccgctg

SEQ ID NO: 567 - DNA, 44 bp, synthetic construct
  misc_feature 1..44: note = oligonucleotide decoy
  source 1..44: mol_type = other DNA
aagatggctccacctgttacatcacgtgtaaacaaacaccggtg

SEQ ID NO: 568 - DNA, 44 bp, synthetic construct
  misc_feature 1..44: note = oligonucleotide decoy
  source 1..44: mol_type = other DNA
aagatggctccacctgttacatcacgtgtaaacaaacaccgttg

SEQ ID NO: 569 - DNA, 44 bp, synthetic construct
  misc_feature 1..44: note = oligonucleotide decoy
  source 1..44: mol_type = other DNA
aagatggctccacctgttacatcacgtgtaaacaaacagcgatg

SEQ ID NO: 570 - DNA, 44 bp, synthetic construct
  misc_feature 1..44: note = oligonucleotide decoy
  source 1..44: mol_type = other DNA
aagatggctccacctgttacatcacgtgtaaacaaacagcgctg

SEQ ID NO: 571 - DNA, 44 bp, synthetic construct
  misc_feature 1..44: note = oligonucleotide decoy
  source 1..44: mol_type = other DNA
aagatggctccacctgttacatcacgtgtaaacaaacagcggtg

SEQ ID NO: 572 - DNA, 44 bp, synthetic construct
  misc_feature 1..44: note = oligonucleotide decoy
  source 1..44: mol_type = other DNA
aagatggctccacctgttacatcacgtgtaaacaaacagcgttg

SEQ ID NO: 573 - DNA, 44 bp, synthetic construct
  misc_feature 1..44: note = oligonucleotide decoy
  source 1..44: mol_type = other DNA
aagatggctccacctgttacatcacgtgtaaacaaacatcgatg

SEQ ID NO: 574 - DNA, 44 bp, synthetic construct
  misc_feature 1..44: note = oligonucleotide decoy
  source 1..44: mol_type = other DNA
aagatggctccacctgttacatcacgtgtaaacaaacatcgctg

SEQ ID NO: 575 - DNA, 44 bp, synthetic construct
  misc_feature 1..44: note = oligonucleotide decoy
  source 1..44: mol_type = other DNA
aagatggctccacctgttacatcacgtgtaaacaaacatcggtg

SEQ ID NO: 576 - DNA, 44 bp, synthetic construct
  misc_feature 1..44: note = oligonucleotide decoy
  source 1..44: mol_type = other DNA
aagatggctccacctgttacatcacgtgtaaacaaacatcgttg

SEQ ID NO: 577 - DNA, 44 bp, synthetic construct
  misc_feature 1..44: note = oligonucleotide decoy
  source 1..44: mol_type = other DNA
aagatggctccacctgttacatcacgtgtaaataaacaacgatg

SEQ ID NO: 578 - DNA, 44 bp, synthetic construct
  misc_feature 1..44: note = oligonucleotide decoy
  source 1..44: mol_type = other DNA
aagatggctccacctgttacatcacgtgtaaataaacaacgctg

SEQ ID NO: 579 - DNA, 44 bp, synthetic construct
  misc_feature 1..44: note = oligonucleotide decoy
  source 1..44: mol_type = other DNA
aagatggctccacctgttacatcacgtgtaaataaacaacggtg

SEQ ID NO: 580 - DNA, 44 bp, synthetic construct
  misc_feature 1..44: note = oligonucleotide decoy
  source 1..44: mol_type = other DNA
aagatggctccacctgttacatcacgtgtaaataaacaacgttg

SEQ ID NO: 581 - DNA, 44 bp, synthetic construct
  misc_feature 1..44: note = oligonucleotide decoy
  source 1..44: mol_type = other DNA
aagatggctccacctgttacatcacgtgtaaataaacaccgatg

SEQ ID NO: 582 - DNA, 44 bp, synthetic construct
  misc_feature 1..44: note = oligonucleotide decoy
  source 1..44: mol_type = other DNA
aagatggctccacctgttacatcacgtgtaaataaacaccgctg

SEQ ID NO: 583 - DNA, 44 bp, synthetic construct
  misc_feature 1..44: note = oligonucleotide decoy
  source 1..44: mol_type = other DNA
aagatggctccacctgttacatcacgtgtaaataaacaccggtg

SEQ ID NO: 584 - DNA, 44 bp, synthetic construct
  misc_feature 1..44: note = oligonucleotide decoy
  source 1..44: mol_type = other DNA
aagatggctccacctgttacatcacgtgtaaataaacaccgttg

SEQ ID NO: 585 - DNA, 44 bp, synthetic construct
  misc_feature 1..44: note = oligonucleotide decoy
  source 1..44: mol_type = other DNA
aagatggctccacctgttacatcacgtgtaaataaacagcgatg

SEQ ID NO: 586 - DNA, 44 bp, synthetic construct
  misc_feature 1..44: note = oligonucleotide decoy
  source 1..44: mol_type = other DNA
aagatggctccacctgttacatcacgtgtaaataaacagcgctg

SEQ ID NO: 587 - DNA, 44 bp, synthetic construct
  misc_feature 1..44: note = oligonucleotide decoy
  source 1..44: mol_type = other DNA
aagatggctccacctgttacatcacgtgtaaataaacagcggtg

SEQ ID NO: 588 - DNA, 44 bp, synthetic construct
  misc_feature 1..44: note = oligonucleotide decoy
  source 1..44: mol_type = other DNA
aagatggctccacctgttacatcacgtgtaaataaacagcgttg

SEQ ID NO: 589 - DNA, 44 bp, synthetic construct
  misc_feature 1..44: note = oligonucleotide decoy
  source 1..44: mol_type = other DNA
aagatggctccacctgttacatcacgtgtaaataaacatcgatg

SEQ ID NO: 590 - DNA, 44 bp, synthetic construct
  misc_feature 1..44: note = oligonucleotide decoy
  source 1..44: mol_type = other DNA
aagatggctccacctgttacatcacgtgtaaataaacatcgctg

SEQ ID NO: 591 - DNA, 44 bp, synthetic construct
  misc_feature 1..44: note = oligonucleotide decoy
  source 1..44: mol_type = other DNA
aagatggctccacctgttacatcacgtgtaaataaacatcggtg

SEQ ID NO: 592 - DNA, 44 bp, synthetic construct
  misc_feature 1..44: note = oligonucleotide decoy
  source 1..44: mol_type = other DNA
aagatggctccacctgttacatcacgtgtaaataaacatcgttg

SEQ ID NO: 593 - DNA, 44 bp, synthetic construct
  misc_feature 1..44: note = oligonucleotide decoy
  source 1..44: mol_type = other DNA
aagatggctccacctgttacgtcacgtgtaaacaaacaacgatg

SEQ ID NO: 594 - DNA, 44 bp, synthetic construct
  misc_feature 1..44: note = oligonucleotide decoy
  source 1..44: mol_type = other DNA
aagatggctccacctgttacgtcacgtgtaaacaaacaacgctg

SEQ ID NO: 595 - DNA, 44 bp, synthetic construct
  misc_feature 1..44: note = oligonucleotide decoy
  source 1..44: mol_type = other DNA
aagatggctccacctgttacgtcacgtgtaaacaaacaacggtg

SEQ ID NO: 596 - DNA, 44 bp, synthetic construct
  misc_feature 1..44: note = oligonucleotide decoy
  source 1..44: mol_type = other DNA
aagatggctccacctgttacgtcacgtgtaaacaaacaacgttg

SEQ ID NO: 597 - DNA, 44 bp, synthetic construct
  misc_feature 1..44: note = oligonucleotide decoy
  source 1..44: mol_type = other DNA
aagatggctccacctgttacgtcacgtgtaaacaaacaccgatg

SEQ ID NO: 598 - DNA, 44 bp, synthetic construct
  misc_feature 1..44: note = oligonucleotide decoy
  source 1..44: mol_type = other DNA
aagatggctccacctgttacgtcacgtgtaaacaaacaccgctg

SEQ ID NO: 599 - DNA, 44 bp, synthetic construct
  misc_feature 1..44: note = oligonucleotide decoy
  source 1..44: mol_type = other DNA
aagatggctccacctgttacgtcacgtgtaaacaaacaccggtg

SEQ ID NO: 600 - DNA, 44 bp, synthetic construct
  misc_feature 1..44: note = oligonucleotide decoy
  source 1..44: mol_type = other DNA
aagatggctccacctgttacgtcacgtgtaaacaaacaccgttg

SEQ ID NO: 601 - DNA, 44 bp, synthetic construct
  misc_feature 1..44: note = oligonucleotide decoy
  source 1..44: mol_type = other DNA
aagatggctccacctgttacgtcacgtgtaaacaaacagcgatg

SEQ ID NO: 602 - DNA, 44 bp, synthetic construct
  misc_feature 1..44: note = oligonucleotide decoy
  source 1..44: mol_type = other DNA
aagatggctccacctgttacgtcacgtgtaaacaaacagcgctg

SEQ ID NO: 603 - DNA, 44 bp, synthetic construct
  misc_feature 1..44: note = oligonucleotide decoy
  source 1..44: mol_type = other DNA
aagatggctccacctgttacgtcacgtgtaaacaaacagcggtg

SEQ ID NO: 604 - DNA, 44 bp, synthetic construct
  misc_feature 1..44: note = oligonucleotide decoy
  source 1..44: mol_type = other DNA
aagatggctccacctgttacgtcacgtgtaaacaaacagcgttg

SEQ ID NO: 605 - DNA, 44 bp, synthetic construct
  misc_feature 1..44: note = oligonucleotide decoy
  source 1..44: mol_type = other DNA
aagatggctccacctgttacgtcacgtgtaaacaaacatcgatg

SEQ ID NO: 606 - DNA, 44 bp, synthetic construct
  misc_feature 1..44: note = oligonucleotide decoy
  source 1..44: mol_type = other DNA
aagatggctccacctgttacgtcacgtgtaaacaaacatcgctg

SEQ ID NO: 607 - DNA, 44 bp, synthetic construct
  misc_feature 1..44: note = oligonucleotide decoy
  source 1..44: mol_type = other DNA
aagatggctccacctgttacgtcacgtgtaaacaaacatcggtg

SEQ ID NO: 608 - DNA, 44 bp, synthetic construct
  misc_feature 1..44: note = oligonucleotide decoy
  source 1..44: mol_type = other DNA
aagatggctccacctgttacgtcacgtgtaaacaaacatcgttg

SEQ ID NO: 609 - DNA, 44 bp, synthetic construct
  misc_feature 1..44: note = oligonucleotide decoy
  source 1..44: mol_type = other DNA
aagatggctccacctgttacgtcacgtgtaaataaacaacgatg

SEQ ID NO: 610 - DNA, 44 bp, synthetic construct
  misc_feature 1..44: note = oligonucleotide decoy
  source 1..44: mol_type = other DNA
aagatggctccacctgttacgtcacgtgtaaataaacaacgctg

SEQ ID NO: 611 - DNA, 44 bp, synthetic construct
  misc_feature 1..44: note = oligonucleotide decoy
  source 1..44: mol_type = other DNA
aagatggctccacctgttacgtcacgtgtaaataaacaacggtg

SEQ ID NO: 612 - DNA, 44 bp, synthetic construct
  misc_feature 1..44: note = oligonucleotide decoy
  source 1..44: mol_type = other DNA
aagatggctccacctgttacgtcacgtgtaaataaacaacgttg

SEQ ID NO: 613 - DNA, 44 bp, synthetic construct
  misc_feature 1..44: note = oligonucleotide decoy
  source 1..44: mol_type = other DNA
aagatggctccacctgttacgtcacgtgtaaataaacaccgatg

SEQ ID NO: 614 - DNA, 44 bp, synthetic construct
  misc_feature 1..44: note = oligonucleotide decoy
  source 1..44: mol_type = other DNA
aagatggctccacctgttacgtcacgtgtaaataaacaccgctg

SEQ ID NO: 615 - DNA, 44 bp, synthetic construct
  misc_feature 1..44: note = oligonucleotide decoy
  source 1..44: mol_type = other DNA
aagatggctccacctgttacgtcacgtgtaaataaacaccggtg

SEQ ID NO: 616 - DNA, 44 bp, synthetic construct
  misc_feature 1..44: note = oligonucleotide decoy
  source 1..44: mol_type = other DNA
aagatggctccacctgttacgtcacgtgtaaataaacaccgttg

SEQ ID NO: 617 - DNA, 44 bp, synthetic construct
  misc_feature 1..44: note = oligonucleotide decoy
  source 1..44: mol_type = other DNA
aagatggctccacctgttacgtcacgtgtaaataaacagcgatg

SEQ ID NO: 618 - DNA, 44 bp, synthetic construct
  misc_feature 1..44: note = oligonucleotide decoy
  source 1..44: mol_type = other DNA
aagatggctccacctgttacgtcacgtgtaaataaacagcgctg

SEQ ID NO: 619 - DNA, 44 bp, synthetic construct
  misc_feature 1..44: note = oligonucleotide decoy
  source 1..44: mol_type = other DNA
aagatggctccacctgttacgtcacgtgtaaataaacagcggtg

SEQ ID NO: 620 - DNA, 44 bp, synthetic construct
  misc_feature 1..44: note = oligonucleotide decoy
  source 1..44: mol_type = other DNA
aagatggctccacctgttacgtcacgtgtaaataaacagcgttg

SEQ ID NO: 621 - DNA, 44 bp, synthetic construct
  misc_feature 1..44: note = oligonucleotide decoy
  source 1..44: mol_type = other DNA
aagatggctccacctgttacgtcacgtgtaaataaacatcgatg

SEQ ID NO: 622 - DNA, 44 bp, synthetic construct
  misc_feature 1..44: note = oligonucleotide decoy
  source 1..44: mol_type = other DNA
aagatggctccacctgttacgtcacgtgtaaataaacatcgctg

SEQ ID NO: 623 - DNA, 44 bp, synthetic construct
  misc_feature 1..44: note = oligonucleotide decoy
  source 1..44: mol_type = other DNA
aagatggctccacctgttacgtcacgtgtaaataaacatcggtg

SEQ ID NO: 624 - DNA, 44 bp, synthetic construct
  misc_feature 1..44: note = oligonucleotide decoy
  source 1..44: mol_type = other DNA
aagatggctccacctgttacgtcacgtgtaaataaacatcgttg

SEQ ID NO: 625 - DNA, 44 bp, synthetic construct
  misc_feature 1..44: note = oligonucleotide decoy
  source 1..44: mol_type = other DNA
aagatggctccacctgttatatcacgtgtaaacaaacaacgatg

SEQ ID NO: 626 - DNA, 44 bp, synthetic construct
  misc_feature 1..44: note = oligonucleotide decoy
  source 1..44: mol_type = other DNA
aagatggctccacctgttatatcacgtgtaaacaaacaacgctg

SEQ ID NO: 627 - DNA, 44 bp, synthetic construct
  misc_feature 1..44: note = oligonucleotide decoy
  source 1..44: mol_type = other DNA
aagatggctccacctgttatatcacgtgtaaacaaacaacggtg

SEQ ID NO: 628 - DNA, 44 bp, synthetic construct
  misc_feature 1..44: note = oligonucleotide decoy
  source 1..44: mol_type = other DNA
aagatggctccacctgttatatcacgtgtaaacaaacaacgttg

SEQ ID NO: 629 - DNA, 44 bp, synthetic construct
  misc_feature 1..44: note = oligonucleotide decoy
  source 1..44: mol_type = other DNA
aagatggctccacctgttatatcacgtgtaaacaaacaccgatg

SEQ ID NO: 630 - DNA, 44 bp, synthetic construct
  misc_feature 1..44: note = oligonucleotide decoy
  source 1..44: mol_type = other DNA
aagatggctccacctgttatatcacgtgtaaacaaacaccgctg

SEQ ID NO: 631 - DNA, 44 bp, synthetic construct
  misc_feature 1..44: note = oligonucleotide decoy
  source 1..44: mol_type = other DNA
aagatggctccacctgttatatcacgtgtaaacaaacaccggtg

SEQ ID NO: 632 - DNA, 44 bp, synthetic construct
  misc_feature 1..44: note = oligonucleotide decoy
  source 1..44: mol_type = other DNA
aagatggctccacctgttatatcacgtgtaaacaaacaccgttg

SEQ ID NO: 633 - DNA, 44 bp, synthetic construct
  misc_feature 1..44: note = oligonucleotide decoy
  source 1..44: mol_type = other DNA
aagatggctccacctgttatatcacgtgtaaacaaacagcgatg

SEQ ID NO: 634 - DNA, 44 bp, synthetic construct
  misc_feature 1..44: note = oligonucleotide decoy
  source 1..44: mol_type = other DNA
aagatggctccacctgttatatcacgtgtaaacaaacagcgctg

SEQ ID NO: 635 - DNA, 44 bp, synthetic construct
  misc_feature 1..44: note = oligonucleotide decoy
  source 1..44: mol_type = other DNA
aagatggctccacctgttatatcacgtgtaaacaaacagcggtg

SEQ ID NO: 636 - DNA, 44 bp, synthetic construct
  misc_feature 1..44: note = oligonucleotide decoy
  source 1..44: mol_type = other DNA
aagatggctccacctgttatatcacgtgtaaacaaacagcgttg

SEQ ID NO: 637 - DNA, 44 bp, synthetic construct
  misc_feature 1..44: note = oligonucleotide decoy
  source 1..44: mol_type = other DNA
aagatggctccacctgttatatcacgtgtaaacaaacatcgatg

SEQ ID NO: 638 - DNA, 44 bp, synthetic construct
  misc_feature 1..44: note = oligonucleotide decoy
  source 1..44: mol_type = other DNA
aagatggctccacctgttatatcacgtgtaaacaaacatcgctg

SEQ ID NO: 639 - DNA, 44 bp, synthetic construct
  misc_feature 1..44: note = oligonucleotide decoy
  source 1..44: mol_type = other DNA
aagatggctccacctgttatatcacgtgtaaacaaacatcggtg

SEQ ID NO: 640 - DNA, 44 bp, synthetic construct
  misc_feature 1..44: note = oligonucleotide decoy
  source 1..44: mol_type = other DNA
aagatggctccacctgttatatcacgtgtaaacaaacatcgttg

SEQ ID NO: 641 - DNA, 44 bp, synthetic construct
  misc_feature 1..44: note = oligonucleotide decoy
  source 1..44: mol_type = other DNA
aagatggctccacctgttatatcacgtgtaaataaacaacgatg

SEQ ID NO: 642 - DNA, 44 bp, synthetic construct
  misc_feature 1..44: note = oligonucleotide decoy
  source 1..44: mol_type = other DNA
aagatggctccacctgttatatcacgtgtaaataaacaacgctg

SEQ ID NO: 643 - DNA, 44 bp, synthetic construct
  misc_feature 1..44: note = oligonucleotide decoy
  source 1..44: mol_type = other DNA
aagatggctccacctgttatatcacgtgtaaataaacaacggtg

SEQ ID NO: 644 - DNA, 44 bp, synthetic construct
  misc_feature 1..44: note = oligonucleotide decoy
  source 1..44: mol_type = other DNA
aagatggctccacctgttatatcacgtgtaaataaacaacgttg

SEQ ID NO: 645 - DNA, 44 bp, synthetic construct
  misc_feature 1..44: note = oligonucleotide decoy
  source 1..44: mol_type = other DNA
aagatggctccacctgttatatcacgtgtaaataaacaccgatg

SEQ ID NO: 646 - DNA, 44 bp, synthetic construct
  misc_feature 1..44: note = oligonucleotide decoy
  source 1..44: mol_type = other DNA
aagatggctccacctgttatatcacgtgtaaataaacaccgctg

SEQ ID NO: 647 - DNA, 44 bp, synthetic construct
  misc_feature 1..44: note = oligonucleotide decoy
  source 1..44: mol_type = other DNA
aagatggctccacctgttatatcacgtgtaaataaacaccggtg

SEQ ID NO: 648 - DNA, 44 bp, synthetic construct
  misc_feature 1..44: note = oligonucleotide decoy
  source 1..44: mol_type = other DNA
aagatggctccacctgttatatcacgtgtaaataaacaccgttg

SEQ ID NO: 649 - DNA, 44 bp, synthetic construct
  misc_feature 1..44: note = oligonucleotide decoy
  source 1..44: mol_type = other DNA
aagatggctccacctgttatatcacgtgtaaataaacagcgatg

SEQ ID NO: 650 - DNA, 44 bp, synthetic construct
  misc_feature 1..44: note = oligonucleotide decoy
  source 1..44: mol_type = other DNA
aagatggctccacctgttatatcacgtgtaaataaacagcgctg

SEQ ID NO: 651 - DNA, 44 bp, synthetic construct
  misc_feature 1..44: note = oligonucleotide decoy
  source 1..44: mol_type = other DNA
aagatggctccacctgttatatcacgtgtaaataaacagcggtg

SEQ ID NO: 652 - DNA, 44 bp, synthetic construct
  misc_feature 1..44: note = oligonucleotide decoy
  source 1..44: mol_type = other DNA
aagatggctccacctgttatatcacgtgtaaataaacagcgttg

SEQ ID NO: 653 - DNA, 44 bp, synthetic construct
  misc_feature 1..44: note = oligonucleotide decoy
  source 1..44: mol_type = other DNA
aagatggctccacctgttatatcacgtgtaaataaacatcgatg

SEQ ID NO: 654 - DNA, 44 bp, synthetic construct
  misc_feature 1..44: note = oligonucleotide decoy
  source 1..44: mol_type = other DNA
aagatggctccacctgttatatcacgtgtaaataaacatcgctg

SEQ ID NO: 655 - DNA, 44 bp, synthetic construct
  misc_feature 1..44: note = oligonucleotide decoy
  source 1..44: mol_type = other DNA
aagatggctccacctgttatatcacgtgtaaataaacatcggtg

SEQ ID NO: 656 - DNA, 44 bp, synthetic construct
  misc_feature 1..44: note = oligonucleotide decoy
  source 1..44: mol_type = other DNA
aagatggctccacctgttatatcacgtgtaaataaacatcgttg

SEQ ID NO: 657 - DNA, 44 bp, synthetic construct
  misc_feature 1..44: note = oligonucleotide decoy
  source 1..44: mol_type = other DNA
aagatggctccacctgttatgtcacgtgtaaacaaacaacgatg

SEQ ID NO: 658 - DNA, 44 bp, synthetic construct
  misc_feature 1..44: note = oligonucleotide decoy
  source 1..44: mol_type = other DNA
aagatggctccacctgttatgtcacgtgtaaacaaacaacgctg

SEQ ID NO: 659 - DNA, 44 bp, synthetic construct
  misc_feature 1..44: note = oligonucleotide decoy
  source 1..44: mol_type = other DNA
aagatggctccacctgttatgtcacgtgtaaacaaacaacggtg

SEQ ID NO: 660 - DNA, 44 bp, synthetic construct
  misc_feature 1..44: note = oligonucleotide decoy
  source 1..44: mol_type = other DNA
aagatggctccacctgttatgtcacgtgtaaacaaacaacgttg

SEQ ID NO: 661 - DNA, 44 bp, synthetic construct
  misc_feature 1..44: note = oligonucleotide decoy
  source 1..44: mol_type = other DNA
aagatggctccacctgttatgtcacgtgtaaacaaacaccgatg

SEQ ID NO: 662 - DNA, 44 bp, synthetic construct
  misc_feature 1..44: note = oligonucleotide decoy
  source 1..44: mol_type = other DNA
aagatggctccacctgttatgtcacgtgtaaacaaacaccgctg

SEQ ID NO: 663 - DNA, 44 bp, synthetic construct
  misc_feature 1..44: note = oligonucleotide decoy
  source 1..44: mol_type = other DNA
aagatggctccacctgttatgtcacgtgtaaacaaacaccggtg

SEQ ID NO: 664 - DNA, 44 bp, synthetic construct
  misc_feature 1..44: note = oligonucleotide decoy
  source 1..44: mol_type = other DNA
aagatggctccacctgttatgtcacgtgtaaacaaacaccgttg

SEQ ID NO: 665 - DNA, 44 bp, synthetic construct
  misc_feature 1..44: note = oligonucleotide decoy
  source 1..44: mol_type = other DNA
aagatggctccacctgttatgtcacgtgtaaacaaacagcgatg

SEQ ID NO: 666 - DNA, 44 bp, synthetic construct
  misc_feature 1..44: note = oligonucleotide decoy
  source 1..44: mol_type = other DNA
aagatggctccacctgttatgtcacgtgtaaacaaacagcgctg

SEQ ID NO: 667 - DNA, 44 bp, synthetic construct
  misc_feature 1..44: note = oligonucleotide decoy
  source 1..44: mol_type = other DNA
aagatggctccacctgttatgtcacgtgtaaacaaacagcggtg

SEQ ID NO: 668 - DNA, 44 bp, synthetic construct
  misc_feature 1..44: note = oligonucleotide decoy
  source 1..44: mol_type = other DNA
aagatggctccacctgttatgtcacgtgtaaacaaacagcgttg

SEQ ID NO: 669 - DNA, 44 bp, synthetic construct
  misc_feature 1..44: note = oligonucleotide decoy
  source 1..44: mol_type = other DNA
aagatggctccacctgttatgtcacgtgtaaacaaacatcgatg

SEQ ID NO: 670 - DNA, 44 bp, synthetic construct
  misc_feature 1..44: note = oligonucleotide decoy
  source 1..44: mol_type = other DNA
aagatggctccacctgttatgtcacgtgtaaacaaacatcgctg

SEQ ID NO: 671 - DNA, 44 bp, synthetic construct
  misc_feature 1..44: note = oligonucleotide decoy
  source 1..44: mol_type = other DNA
aagatggctccacctgttatgtcacgtgtaaacaaacatcggtg

SEQ ID NO: 672 - DNA, 44 bp, synthetic construct
  misc_feature 1..44: note = oligonucleotide decoy
  source 1..44: mol_type = other DNA
aagatggctccacctgttatgtcacgtgtaaacaaacatcgttg

SEQ ID NO: 673 - DNA, 44 bp, synthetic construct
  misc_feature 1..44: note = oligonucleotide decoy
  source 1..44: mol_type = other DNA
aagatggctccacctgttatgtcacgtgtaaataaacaacgatg

SEQ ID NO: 674 - DNA, 44 bp, synthetic construct
  misc_feature 1..44: note = oligonucleotide decoy
  source 1..44: mol_type = other DNA
aagatggctccacctgttatgtcacgtgtaaataaacaacgctg

SEQ ID NO: 675 - DNA, 44 bp, synthetic construct
  misc_feature 1..44: note = oligonucleotide decoy
  source 1..44: mol_type = other DNA
aagatggctccacctgttatgtcacgtgtaaataaacaacggtg

SEQ ID NO: 676 - DNA, 44 bp, synthetic construct
  misc_feature 1..44: note = oligonucleotide decoy
  source 1..44: mol_type = other DNA
aagatggctccacctgttatgtcacgtgtaaataaacaacgttg

SEQ ID NO: 677 - DNA, 44 bp, synthetic construct
  misc_feature 1..44: note = oligonucleotide decoy
  source 1..44: mol_type = other DNA
aagatggctccacctgttatgtcacgtgtaaataaacaccgatg

SEQ ID NO: 678 - DNA, 44 bp, synthetic construct
  misc_feature 1..44: note = oligonucleotide decoy
  source 1..44: mol_type = other DNA
aagatggctccacctgttatgtcacgtgtaaataaacaccgctg

SEQ ID NO: 679 - DNA, 44 bp, synthetic construct
  misc_feature 1..44: note = oligonucleotide decoy
  source 1..44: mol_type = other DNA
aagatggctccacctgttatgtcacgtgtaaataaacaccggtg

SEQ ID NO: 680 - DNA, 44 bp, synthetic construct
  misc_feature 1..44: note = oligonucleotide decoy
  source 1..44: mol_type = other DNA
aagatggctccacctgttatgtcacgtgtaaataaacaccgttg

SEQ ID NO: 681 - DNA, 44 bp, synthetic construct
  misc_feature 1..44: note = oligonucleotide decoy
  source 1..44: mol_type = other DNA
aagatggctccacctgttatgtcacgtgtaaataaacagcgatg

SEQ ID NO: 682 - DNA, 44 bp, synthetic construct
  misc_feature 1..44: note = oligonucleotide decoy
  source 1..44: mol_type = other DNA
aagatggctccacctgttatgtcacgtgtaaataaacagcgctg

SEQ ID NO: 683 - DNA, 44 bp, synthetic construct
  misc_feature 1..44: note = oligonucleotide decoy
  source 1..44: mol_type = other DNA
aagatggctccacctgttatgtcacgtgtaaataaacagcggtg

SEQ ID NO: 684 - DNA, 44 bp, synthetic construct
  misc_feature 1..44: note = oligonucleotide decoy
  source 1..44: mol_type = other DNA
aagatggctccacctgttatgtcacgtgtaaataaacagcgttg

SEQ ID NO: 685 - DNA, 44 bp, synthetic construct
  misc_feature 1..44: note = oligonucleotide decoy
  source 1..44: mol_type = other DNA
aagatggctccacctgttatgtcacgtgtaaataaacatcgatg

SEQ ID NO: 686 - DNA, 44 bp, synthetic construct
  misc_feature 1..44: note = oligonucleotide decoy
  source 1..44: mol_type = other DNA
aagatggctccacctgttatgtcacgtgtaaataaacatcgctg

SEQ ID NO: 687 - DNA, 44 bp, synthetic construct
  misc_feature 1..44: note = oligonucleotide decoy
  source 1..44: mol_type = other DNA
aagatggctccacctgttatgtcacgtgtaaataaacatcggtg

SEQ ID NO: 688 - DNA, 44 bp, synthetic construct
  misc_feature 1..44: note = oligonucleotide decoy
  source 1..44: mol_type = other DNA
aagatggctccacctgttatgtcacgtgtaaataaacatcgttg

SEQ ID NO: 689 - DNA, 44 bp, synthetic construct
  misc_feature 1..44: note = oligonucleotide decoy
  source 1..44: mol_type = other DNA
aaaatggctccacctgttacatcacgtgtaaacaaacaacgatg

SEQ ID NO: 690 - DNA, 44 bp, synthetic construct
  misc_feature 1..44: note = oligonucleotide decoy
  source 1..44: mol_type = other DNA
aaaatggctccacctgttacatcacgtgtaaacaaacaacgctg

SEQ ID NO: 691 - DNA, 44 bp, synthetic construct
  misc_feature 1..44: note = oligonucleotide decoy
  source 1..44: mol_type = other DNA
aaaatggctccacctgttacatcacgtgtaaacaaacaacggtg

SEQ ID NO: 692 - DNA, 44 bp, synthetic construct
  misc_feature 1..44: note = oligonucleotide decoy
  source 1..44: mol_type = other DNA
aaaatggctccacctgttacatcacgtgtaaacaaacaacgttg

SEQ ID NO: 693 - DNA, 44 bp, synthetic construct
  misc_feature 1..44: note = oligonucleotide decoy
  source 1..44: mol_type = other DNA
aaaatggctccacctgttacatcacgtgtaaacaaacaccgatg

SEQ ID NO: 694 - DNA, 44 bp, synthetic construct
  misc_feature 1..44: note = oligonucleotide decoy
  source 1..44: mol_type = other DNA
aaaatggctccacctgttacatcacgtgtaaacaaacaccgctg

SEQ ID NO: 695 - DNA, 44 bp, synthetic construct
  misc_feature 1..44: note = oligonucleotide decoy
  source 1..44: mol_type = other DNA
aaaatggctccacctgttacatcacgtgtaaacaaacaccggtg

SEQ ID NO: 696 - DNA, 44 bp, synthetic construct
  misc_feature 1..44: note = oligonucleotide decoy
  source 1..44: mol_type = other DNA
aaaatggctccacctgttacatcacgtgtaaacaaacaccgttg

SEQ ID NO: 697 - DNA, 44 bp, synthetic construct
  misc_feature 1..44: note = oligonucleotide decoy
  source 1..44: mol_type = other DNA
aaaatggctccacctgttacatcacgtgtaaacaaacagcgatg

SEQ ID NO: 698 - DNA, 44 bp, synthetic construct
  misc_feature 1..44: note = oligonucleotide decoy
  source 1..44: mol_type = other DNA
aaaatggctccacctgttacatcacgtgtaaacaaacagcgctg

SEQ ID NO: 699 - DNA, 44 bp, synthetic construct
  misc_feature 1..44: note = oligonucleotide decoy
  source 1..44: mol_type = other DNA
aaaatggctccacctgttacatcacgtgtaaacaaacagcggtg

SEQ ID NO: 700 - DNA, 44 bp, synthetic construct
  misc_feature 1..44: note = oligonucleotide decoy
  source 1..44: mol_type = other DNA
aaaatggctccacctgttacatcacgtgtaaacaaacagcgttg

SEQ ID NO: 701 - DNA, 44 bp, synthetic construct
  misc_feature 1..44: note = oligonucleotide decoy
  source 1..44: mol_type = other DNA
aaaatggctccacctgttacatcacgtgtaaacaaacatcgatg

SEQ ID NO: 702 - DNA, 44 bp, synthetic construct
  misc_feature 1..44: note = oligonucleotide decoy
  source 1..44: mol_type = other DNA
aaaatggctccacctgttacatcacgtgtaaacaaacatcgctg

SEQ ID NO: 703 - DNA, 44 bp, synthetic construct
  misc_feature 1..44: note = oligonucleotide decoy
  source 1..44: mol_type = other DNA
aaaatggctccacctgttacatcacgtgtaaacaaacatcggtg

SEQ ID NO: 704 - DNA, 44 bp, synthetic construct
  misc_feature 1..44: note = oligonucleotide decoy
  source 1..44: mol_type = other DNA
aaaatggctccacctgttacatcacgtgtaaacaaacatcgttg

SEQ ID NO: 705 - DNA, 44 bp, synthetic construct
  misc_feature 1..44: note = oligonucleotide decoy
  source 1..44: mol_type = other DNA
aaaatggctccacctgttacatcacgtgtaaataaacaacgatg

SEQ ID NO: 706 - DNA, 44 bp, synthetic construct
  misc_feature 1..44: note = oligonucleotide decoy
  source 1..44: mol_type = other DNA
aaaatggctccacctgttacatcacgtgtaaataaacaacgctg

SEQ ID NO: 707 - DNA, 44 bp, synthetic construct
  misc_feature 1..44: note = oligonucleotide decoy
  source 1..44: mol_type = other DNA
aaaatggctccacctgttacatcacgtgtaaataaacaacggtg

SEQ ID NO: 708 - DNA, 44 bp, synthetic construct
  misc_feature 1..44: note = oligonucleotide decoy
  source 1..44: mol_type = other DNA
aaaatggctccacctgttacatcacgtgtaaataaacaacgttg

SEQ ID NO: 709 - DNA, 44 bp, synthetic construct
  misc_feature 1..44: note = oligonucleotide decoy
  source 1..44: mol_type = other DNA
aaaatggctccacctgttacatcacgtgtaaataaacaccgatg

SEQ ID NO: 710 - DNA, 44 bp, synthetic construct
  misc_feature 1..44: note = oligonucleotide decoy
  source 1..44: mol_type = other DNA
aaaatggctccacctgttacatcacgtgtaaataaacaccgctg

SEQ ID NO: 711 - DNA, 44 bp, synthetic construct
  misc_feature 1..44: note = oligonucleotide decoy
  source 1..44: mol_type = other DNA
aaaatggctccacctgttacatcacgtgtaaataaacaccggtg

SEQ ID NO: 712 - DNA, 44 bp, synthetic construct
  misc_feature 1..44: note = oligonucleotide decoy
  source 1..44: mol_type = other DNA
aaaatggctccacctgttacatcacgtgtaaataaacaccgttg

SEQ ID NO: 713 - DNA, 44 bp, synthetic construct
  misc_feature 1..44: note = oligonucleotide decoy
  source 1..44: mol_type = other DNA
aaaatggctccacctgttacatcacgtgtaaataaacagcgatg

SEQ ID NO: 714 - DNA, 44 bp, synthetic construct
  misc_feature 1..44: note = oligonucleotide decoy
  source 1..44: mol_type = other DNA
aaaatggctccacctgttacatcacgtgtaaataaacagcgctg

SEQ ID NO: 715 - DNA, 44 bp, synthetic construct
  misc_feature 1..44: note = oligonucleotide decoy
  source 1..44: mol_type = other DNA
aaaatggctccacctgttacatcacgtgtaaataaacagcggtg

SEQ ID NO: 716 - DNA, 44 bp, synthetic construct
  misc_feature 1..44: note = oligonucleotide decoy
  source 1..44: mol_type = other DNA
aaaatggctccacctgttacatcacgtgtaaataaacagcgttg

SEQ ID NO: 717 - DNA, 44 bp, synthetic construct
  misc_feature 1..44: note = oligonucleotide decoy
  source 1..44: mol_type = other DNA
aaaatggctccacctgttacatcacgtgtaaataaacatcgatg

SEQ ID NO: 718 - DNA, 44 bp, synthetic construct
  misc_feature 1..44: note = oligonucleotide decoy
  source 1..44: mol_type = other DNA
aaaatggctccacctgttacatcacgtgtaaataaacatcgctg

SEQ ID NO: 719 - DNA, 44 bp, synthetic construct
  misc_feature 1..44: note = oligonucleotide decoy
  source 1..44: mol_type = other DNA
aaaatggctccacctgttacatcacgtgtaaataaacatcggtg

SEQ ID NO: 720 - DNA, 44 bp, synthetic construct
  misc_feature 1..44: note = oligonucleotide decoy
  source 1..44: mol_type = other DNA
aaaatggctccacctgttacatcacgtgtaaataaacatcgttg

SEQ ID NO: 721 - DNA, 44 bp, synthetic construct
  misc_feature 1..44: note = oligonucleotide decoy
  source 1..44: mol_type = other DNA
aaaatggctccacctgttacgtcacgtgtaaacaaacaacgatg

SEQ ID NO: 722 - DNA, 44 bp, synthetic construct
  misc_feature 1..44: note = oligonucleotide decoy
  source 1..44: mol_type = other DNA
aaaatggctccacctgttacgtcacgtgtaaacaaacaacgctg

SEQ ID NO: 723 - DNA, 44 bp, synthetic construct
  misc_feature 1..44: note = oligonucleotide decoy
  source 1..44: mol_type = other DNA
aaaatggctccacctgttacgtcacgtgtaaacaaacaacggtg

SEQ ID NO: 724 - DNA, 44 bp, synthetic construct
  misc_feature 1..44: note = oligonucleotide decoy
  source 1..44: mol_type = other DNA
aaaatggctccacctgttacgtcacgtgtaaacaaacaacgttg

SEQ ID NO: 725 - DNA, 44 bp, synthetic construct
  misc_feature 1..44: note = oligonucleotide decoy
  source 1..44: mol_type = other DNA
aaaatggctccacctgttacgtcacgtgtaaacaaacaccgatg

SEQ ID NO: 726 - DNA, 44 bp, synthetic construct
  misc_feature 1..44: note = oligonucleotide decoy
  source 1..44: mol_type = other DNA
aaaatggctccacctgttacgtcacgtgtaaacaaacaccgctg

SEQ ID NO: 727 - DNA, 44 bp, synthetic construct
  misc_feature 1..44: note = oligonucleotide decoy
  source 1..44: mol_type = other DNA
aaaatggctccacctgttacgtcacgtgtaaacaaacaccggtg

SEQ ID NO: 728 - DNA, 44 bp, synthetic construct
  misc_feature 1..44: note = oligonucleotide decoy
  source 1..44: mol_type = other DNA
aaaatggctccacctgttacgtcacgtgtaaacaaacaccgttg

SEQ ID NO: 729 - DNA, 44 bp, synthetic construct
  misc_feature 1..44: note = oligonucleotide decoy
  source 1..44: mol_type = other DNA
aaaatggctccacctgttacgtcacgtgtaaacaaacagcgatg

SEQ ID NO: 730 - DNA, 44 bp, synthetic construct
  misc_feature 1..44: note = oligonucleotide decoy
  source 1..44: mol_type = other DNA
aaaatggctccacctgttacgtcacgtgtaaacaaacagcgctg

SEQ ID NO: 731 - DNA, 44 bp, synthetic construct
  misc_feature 1..44: note = oligonucleotide decoy
  source 1..44: mol_type = other DNA
aaaatggctccacctgttacgtcacgtgtaaacaaacagcggtg

SEQ ID NO: 732 - DNA, 44 bp, synthetic construct
  misc_feature 1..44: note = oligonucleotide decoy
  source 1..44: mol_type = other DNA
aaaatggctccacctgttacgtcacgtgtaaacaaacagcgttg

SEQ ID NO: 733 - DNA, 44 bp, synthetic construct
  misc_feature 1..44: note = oligonucleotide decoy
  source 1..44: mol_type = other DNA
aaaatggctccacctgttacgtcacgtgtaaacaaacatcgatg

SEQ ID NO: 734 - DNA, 44 bp, synthetic construct
  misc_feature 1..44: note = oligonucleotide decoy
  source 1..44: mol_type = other DNA
aaaatggctccacctgttacgtcacgtgtaaacaaacatcgctg

SEQ ID NO: 735 - DNA, 44 bp, synthetic construct
  misc_feature 1..44: note = oligonucleotide decoy
  source 1..44: mol_type = other DNA
aaaatggctccacctgttacgtcacgtgtaaacaaacatcggtg

SEQ ID NO: 736 - DNA, 44 bp, synthetic construct
  misc_feature 1..44: note = oligonucleotide decoy
  source 1..44: mol_type = other DNA
aaaatggctccacctgttacgtcacgtgtaaacaaacatcgttg

SEQ ID NO: 737 - DNA, 44 bp, synthetic construct
  misc_feature 1..44: note = oligonucleotide decoy
  source 1..44: mol_type = other DNA
aaaatggctccacctgttacgtcacgtgtaaataaacaacgatg

SEQ ID NO: 738 - DNA, 44 bp, synthetic construct
  misc_feature 1..44: note = oligonucleotide decoy
  source 1..44: mol_type = other DNA
aaaatggctccacctgttacgtcacgtgtaaataaacaacgctg

SEQ ID NO: 739 - DNA, 44 bp, synthetic construct
  misc_feature 1..44: note = oligonucleotide decoy
  source 1..44: mol_type = other DNA
aaaatggctccacctgttacgtcacgtgtaaataaacaacggtg

SEQ ID NO: 740 - DNA, 44 bp, synthetic construct
  misc_feature 1..44: note = oligonucleotide decoy
  source 1..44: mol_type = other DNA
aaaatggctccacctgttacgtcacgtgtaaataaacaacgttg

SEQ ID NO: 741 - DNA, 44 bp, synthetic construct
  misc_feature 1..44: note = oligonucleotide decoy
  source 1..44: mol_type = other DNA
aaaatggctccacctgttacgtcacgtgtaaataaacaccgatg

SEQ ID NO: 742 - DNA, 44 bp, synthetic construct
  misc_feature 1..44: note = oligonucleotide decoy
  source 1..44: mol_type = other DNA
aaaatggctccacctgttacgtcacgtgtaaataaacaccgctg

SEQ ID NO: 743 - DNA, 44 bp, synthetic construct
  misc_feature 1..44: note = oligonucleotide decoy
  source 1..44: mol_type = other DNA
aaaatggctccacctgttacgtcacgtgtaaataaacaccggtg

SEQ ID NO: 744 - DNA, 44 bp, synthetic construct
  misc_feature 1..44: note = oligonucleotide decoy
  source 1..44: mol_type = other DNA
aaaatggctccacctgttacgtcacgtgtaaataaacaccgttg

SEQ ID NO: 745 - DNA, 44 bp, synthetic construct
  misc_feature 1..44: note = oligonucleotide decoy
  source 1..44: mol_type = other DNA
aaaatggctccacctgttacgtcacgtgtaaataaacagcgatg

SEQ ID NO: 746 - DNA, 44 bp, synthetic construct
  misc_feature 1..44: note = oligonucleotide decoy
  source 1..44: mol_type = other DNA
aaaatggctccacctgttacgtcacgtgtaaataaacagcgctg

SEQ ID NO: 747 - DNA, 44 bp, synthetic construct
  misc_feature 1..44: note = oligonucleotide decoy
  source 1..44: mol_type = other DNA
aaaatggctccacctgttacgtcacgtgtaaataaacagcggtg

SEQ ID NO: 748 - DNA, 44 bp, synthetic construct
  misc_feature 1..44: note = oligonucleotide decoy
  source 1..44: mol_type = other DNA
aaaatggctccacctgttacgtcacgtgtaaataaacagcgttg

SEQ ID NO: 749 - DNA, 44 bp, synthetic construct
  misc_feature 1..44: note = oligonucleotide decoy
  source 1..44: mol_type = other DNA
aaaatggctccacctgttacgtcacgtgtaaataaacatcgatg

SEQ ID NO: 750 - DNA, 44 bp, synthetic construct
  misc_feature 1..44: note = oligonucleotide decoy
  source 1..44: mol_type = other DNA
aaaatggctccacctgttacgtcacgtgtaaataaacatcgctg

SEQ ID NO: 751 - DNA, 44 bp, synthetic construct
  misc_feature 1..44: note = oligonucleotide decoy
  source 1..44: mol_type = other DNA
aaaatggctccacctgttacgtcacgtgtaaataaacatcggtg

SEQ ID NO: 752 - DNA, 44 bp, synthetic construct
  misc_feature 1..44: note = oligonucleotide decoy
  source 1..44: mol_type = other DNA
aaaatggctccacctgttacgtcacgtgtaaataaacatcgttg

SEQ ID NO: 753 - DNA, 44 bp, synthetic construct
  misc_feature 1..44: note = oligonucleotide decoy
  source 1..44: mol_type = other DNA
aaaatggctccacctgttatatcacgtgtaaacaaacaacgatg

SEQ ID NO: 754 - DNA, 44 bp, synthetic construct
  misc_feature 1..44: note = oligonucleotide decoy
  source 1..44: mol_type = other DNA
aaaatggctccacctgttatatcacgtgtaaacaaacaacgctg

SEQ ID NO: 755 - DNA, 44 bp, synthetic construct
  misc_feature 1..44: note = oligonucleotide decoy
  source 1..44: mol_type = other DNA
aaaatggctccacctgttatatcacgtgtaaacaaacaacggtg

SEQ ID NO: 756 - DNA, 44 bp, synthetic construct
  misc_feature 1..44: note = oligonucleotide decoy
  source 1..44: mol_type = other DNA
aaaatggctccacctgttatatcacgtgtaaacaaacaacgttg

SEQ ID NO: 757 - DNA, 44 bp, synthetic construct
  misc_feature 1..44: note = oligonucleotide decoy
  source 1..44: mol_type = other DNA
aaaatggctccacctgttatatcacgtgtaaacaaacaccgatg

SEQ ID NO: 758 - DNA, 44 bp, synthetic construct
  misc_feature 1..44: note = oligonucleotide decoy
  source 1..44: mol_type = other DNA
aaaatggctccacctgttatatcacgtgtaaacaaacaccgctg

SEQ ID NO: 759 - DNA, 44 bp, synthetic construct
  misc_feature 1..44: note = oligonucleotide decoy
  source 1..44: mol_type = other DNA
aaaatggctccacctgttatatcacgtgtaaacaaacaccggtg

SEQ ID NO: 760 - DNA, 44 bp, synthetic construct
  misc_feature 1..44: note = oligonucleotide decoy
  source 1..44: mol_type = other DNA
aaaatggctccacctgttatatcacgtgtaaacaaacaccgttg

SEQ ID NO: 761 - DNA, 44 bp, synthetic construct
  misc_feature 1..44: note = oligonucleotide decoy
  source 1..44: mol_type = other DNA
aaaatggctccacctgttatatcacgtgtaaacaaacagcgatg

SEQ ID NO: 762 - DNA, 44 bp, synthetic construct
  misc_feature 1..44: note = oligonucleotide decoy
  source 1..44: mol_type = other DNA
aaaatggctccacctgttatatcacgtgtaaacaaacagcgctg

SEQ ID NO: 763 - DNA, 44 bp, synthetic construct
  misc_feature 1..44: note = oligonucleotide decoy
  source 1..44: mol_type = other DNA
aaaatggctccacctgttatatcacgtgtaaacaaacagcggtg

SEQ ID NO: 764 - DNA, 44 bp, synthetic construct
  misc_feature 1..44: note = oligonucleotide decoy
  source 1..44: mol_type = other DNA
aaaatggctccacctgttatatcacgtgtaaacaaacagcgttg

SEQ ID NO: 765 - DNA, 44 bp, synthetic construct
  misc_feature 1..44: note = oligonucleotide decoy
  source 1..44: mol_type = other DNA
aaaatggctccacctgttatatcacgtgtaaacaaacatcgatg

SEQ ID NO: 766 - DNA, 44 bp, synthetic construct
  misc_feature 1..44: note = oligonucleotide decoy
  source 1..44: mol_type = other DNA
aaaatggctccacctgttatatcacgtgtaaacaaacatcgctg

SEQ ID NO: 767 - DNA, 44 bp, synthetic construct
  misc_feature 1..44: note = oligonucleotide decoy
  source 1..44: mol_type = other DNA
aaaatggctccacctgttatatcacgtgtaaacaaacatcggtg

SEQ ID NO: 768 - DNA, 44 bp, synthetic construct
  misc_feature 1..44: note = oligonucleotide decoy
  source 1..44: mol_type = other DNA
aaaatggctccacctgttatatcacgtgtaaacaaacatcgttg

SEQ ID NO: 769 - DNA, 44 bp, synthetic construct
  misc_feature 1..44: note = oligonucleotide decoy
  source 1..44: mol_type = other DNA
aaaatggctccacctgttatatcacgtgtaaataaacaacgatg

SEQ ID NO: 770 - DNA, 44 bp, synthetic construct
  misc_feature 1..44: note = oligonucleotide decoy
  source 1..44: mol_type = other DNA
aaaatggctccacctgttatatcacgtgtaaataaacaacgctg

SEQ ID NO: 771 - DNA, 44 bp, synthetic construct
  misc_feature 1..44: note = oligonucleotide decoy
  source 1..44: mol_type = other DNA
aaaatggctccacctgttatatcacgtgtaaataaacaacggtg

SEQ ID NO: 772 - DNA, 44 bp, synthetic construct
  misc_feature 1..44: note = oligonucleotide decoy
  source 1..44: mol_type = other DNA
aaaatggctccacctgttatatcacgtgtaaataaacaacgttg

SEQ ID NO: 773 - DNA, 44 bp, synthetic construct
  misc_feature 1..44: note = oligonucleotide decoy
  source 1..44: mol_type = other DNA
aaaatggctccacctgttatatcacgtgtaaataaacaccgatg

SEQ ID NO: 774 - DNA, 44 bp, synthetic construct
  misc_feature 1..44: note = oligonucleotide decoy
  source 1..44: mol_type = other DNA
aaaatggctccacctgttatatcacgtgtaaataaacaccgctg

SEQ ID NO: 775 - DNA, 44 bp, synthetic construct
  misc_feature 1..44: note = oligonucleotide decoy
  source 1..44: mol_type = other DNA
aaaatggctccacctgttatatcacgtgtaaataaacaccggtg

SEQ ID NO: 776 - DNA, 44 bp, synthetic construct
  misc_feature 1..44: note = oligonucleotide decoy
  source 1..44: mol_type = other DNA
aaaatggctccacctgttatatcacgtgtaaataaacaccgttg

SEQ ID NO: 777 - DNA, 44 bp, synthetic construct
  misc_feature 1..44: note = oligonucleotide decoy
  source 1..44: mol_type = other DNA
aaaatggctccacctgttatatcacgtgtaaataaacagcgatg

SEQ ID NO: 778 - DNA, 44 bp, synthetic construct
  misc_feature 1..44: note = oligonucleotide decoy
  source 1..44: mol_type = other DNA
aaaatggctccacctgttatatcacgtgtaaataaacagcgctg

SEQ ID NO: 779 - DNA, 44 bp, synthetic construct
  misc_feature 1..44: note = oligonucleotide decoy
  source 1..44: mol_type = other DNA
aaaatggctccacctgttatatcacgtgtaaataaacagcggtg

SEQ ID NO: 780 - DNA, 44 bp, synthetic construct
  misc_feature 1..44: note = oligonucleotide decoy
  source 1..44: mol_type = other DNA
aaaatggctccacctgttatatcacgtgtaaataaacagcgttg

SEQ ID NO: 781 - DNA, 44 bp, synthetic construct
  misc_feature 1..44: note = oligonucleotide decoy
  source 1..44: mol_type = other DNA
aaaatggctccacctgttatatcacgtgtaaataaacatcgatg

SEQ ID NO: 782 - DNA, 44 bp, synthetic construct
  misc_feature 1..44: note = oligonucleotide decoy
  source 1..44: mol_type = other DNA
aaaatggctccacctgttatatcacgtgtaaataaacatcgctg

SEQ ID NO: 783 - DNA, 44 bp, synthetic construct
  misc_feature 1..44: note = oligonucleotide decoy
  source 1..44: mol_type = other DNA
aaaatggctccacctgttatatcacgtgtaaataaacatcggtg

SEQ ID NO: 784 - DNA, 44 bp, synthetic construct
  misc_feature 1..44: note = oligonucleotide decoy
  source 1..44: mol_type = other DNA
aaaatggctccacctgttatatcacgtgtaaataaacatcgttg

SEQ ID NO: 785 - DNA, 44 bp, synthetic construct
  misc_feature 1..44: note = oligonucleotide decoy
  source 1..44: mol_type = other DNA
aaaatggctccacctgttatgtcacgtgtaaacaaacaacgatg

SEQ ID NO: 786 - DNA, 44 bp, synthetic construct
  misc_feature 1..44: note = oligonucleotide decoy
  source 1..44: mol_type = other DNA
aaaatggctccacctgttatgtcacgtgtaaacaaacaacgctg

SEQ ID NO: 787 - DNA, 44 bp, synthetic construct
  misc_feature 1..44: note = oligonucleotide decoy
  source 1..44: mol_type = other DNA
aaaatggctccacctgttatgtcacgtgtaaacaaacaacggtg

SEQ ID NO: 788 - DNA, 44 bp, synthetic construct
  misc_feature 1..44: note = oligonucleotide decoy
  source 1..44: mol_type = other DNA
aaaatggctccacctgttatgtcacgtgtaaacaaacaacgttg

SEQ ID NO: 789 - DNA, 44 bp, synthetic construct
  misc_feature 1..44: note = oligonucleotide decoy
  source 1..44: mol_type = other DNA
aaaatggctccacctgttatgtcacgtgtaaacaaacaccgatg

SEQ ID NO: 790 - DNA, 44 bp, synthetic construct
  misc_feature 1..44: note = oligonucleotide decoy
  source 1..44: mol_type = other DNA
aaaatggctccacctgttatgtcacgtgtaaacaaacaccgctg

SEQ ID NO: 791 - DNA, 44 bp, synthetic construct
  misc_feature 1..44: note = oligonucleotide decoy
  source 1..44: mol_type = other DNA
aaaatggctccacctgttatgtcacgtgtaaacaaacaccggtg

SEQ ID NO: 792 - DNA, 44 bp, synthetic construct
  misc_feature 1..44: note = oligonucleotide decoy
  source 1..44: mol_type = other DNA
aaaatggctccacctgttatgtcacgtgtaaacaaacaccgttg

SEQ ID NO: 793 - DNA, 44 bp, synthetic construct
  misc_feature 1..44: note = oligonucleotide decoy
  source 1..44: mol_type = other DNA
aaaatggctccacctgttatgtcacgtgtaaacaaacagcgatg

SEQ ID NO: 794 - DNA, 44 bp, synthetic construct
  misc_feature 1..44: note = oligonucleotide decoy
  source 1..44: mol_type = other DNA
aaaatggctccacctgttatgtcacgtgtaaacaaacagcgctg

SEQ ID NO: 795 - DNA, 44 bp, synthetic construct
  misc_feature 1..44: note = oligonucleotide decoy
  source 1..44: mol_type = other DNA
aaaatggctccacctgttatgtcacgtgtaaacaaacagcggtg

SEQ ID NO: 796 - DNA, 44 bp, synthetic construct
  misc_feature 1..44: note = oligonucleotide decoy
  source 1..44: mol_type = other DNA
aaaatggctccacctgttatgtcacgtgtaaacaaacagcgttg

SEQ ID NO: 797 - DNA, 44 bp, synthetic construct
  misc_feature 1..44: note = oligonucleotide decoy
  source 1..44: mol_type = other DNA
aaaatggctccacctgttatgtcacgtgtaaacaaacatcgatg

SEQ ID NO: 798 - DNA, 44 bp, synthetic construct
  misc_feature 1..44: note = oligonucleotide decoy
  source 1..44: mol_type = other DNA
aaaatggctccacctgttatgtcacgtgtaaacaaacatcgctg

SEQ ID NO: 799 - DNA, 44 bp, synthetic construct
  misc_feature 1..44: note = oligonucleotide decoy
  source 1..44: mol_type = other DNA
aaaatggctccacctgttatgtcacgtgtaaacaaacatcggtg

SEQ ID NO: 800 - DNA, 44 bp, synthetic construct
  misc_feature 1..44: note = oligonucleotide decoy
  source 1..44: mol_type = other DNA
aaaatggctccacctgttatgtcacgtgtaaacaaacatcgttg

SEQ ID NO: 801 - DNA, 44 bp, synthetic construct
  misc_feature 1..44: note = oligonucleotide decoy
  source 1..44: mol_type = other DNA
aaaatggctccacctgttatgtcacgtgtaaataaacaacgatg

SEQ ID NO: 802 - DNA, 44 bp, synthetic construct
  misc_feature 1..44: note = oligonucleotide decoy
  source 1..44: mol_type = other DNA
aaaatggctccacctgttatgtcacgtgtaaataaacaacgctg

SEQ ID NO: 803 - DNA, 44 bp, synthetic construct
  misc_feature 1..44: note = oligonucleotide decoy
  source 1..44: mol_type = other DNA
aaaatggctccacctgttatgtcacgtgtaaataaacaacggtg

SEQ ID NO: 804 - DNA, 44 bp, synthetic construct
  misc_feature 1..44: note = oligonucleotide decoy
  source 1..44: mol_type = other DNA
aaaatggctccacctgttatgtcacgtgtaaataaacaacgttg

SEQ ID NO: 805 - DNA, 44 bp, synthetic construct
  misc_feature 1..44: note = oligonucleotide decoy
  source 1..44: mol_type = other DNA
aaaatggctccacctgttatgtcacgtgtaaataaacaccgatg

SEQ ID NO: 806 - DNA, 44 bp, synthetic construct
  misc_feature 1..44: note = oligonucleotide decoy
  source 1..44: mol_type = other DNA
aaaatggctccacctgttatgtcacgtgtaaataaacaccgctg

SEQ ID NO: 807 - DNA, 44 bp, synthetic construct
  misc_feature 1..44: note = oligonucleotide decoy
  source 1..44: mol_type = other DNA
aaaatggctccacctgttatgtcacgtgtaaataaacaccggtg

SEQ ID NO: 808 - DNA, 44 bp, synthetic construct
  misc_feature 1..44: note = oligonucleotide decoy
  source 1..44: mol_type = other DNA
aaaatggctccacctgttatgtcacgtgtaaataaacaccgttg

SEQ ID NO: 809 - DNA, 44 bp, synthetic construct
  misc_feature 1..44: note = oligonucleotide decoy
  source 1..44: mol_type = other DNA
aaaatggctccacctgttatgtcacgtgtaaataaacagcgatg

SEQ ID NO: 810 - DNA, 44 bp, synthetic construct
  misc_feature 1..44: note = oligonucleotide decoy
  source 1..44: mol_type = other DNA
aaaatggctccacctgttatgtcacgtgtaaataaacagcgctg

SEQ ID NO: 811 - DNA, 44 bp, synthetic construct
  misc_feature 1..44: note = oligonucleotide decoy
  source 1..44: mol_type = other DNA
aaaatggctccacctgttatgtcacgtgtaaataaacagcggtg

SEQ ID NO: 812 - DNA, 44 bp, synthetic construct
  misc_feature 1..44: note = oligonucleotide decoy
  source 1..44: mol_type = other DNA
aaaatggctccacctgttatgtcacgtgtaaataaacagcgttg

SEQ ID NO: 813 - DNA, 44 bp, synthetic construct
  misc_feature 1..44: note = oligonucleotide decoy
  source 1..44: mol_type = other DNA
aaaatggctccacctgttatgtcacgtgtaaataaacatcgatg

SEQ ID NO: 814 - DNA, 44 bp, synthetic construct
  misc_feature 1..44: note = oligonucleotide decoy
  source 1..44: mol_type = other DNA
aaaatggctccacctgttatgtcacgtgtaaataaacatcgctg

SEQ ID NO: 815 - DNA, 44 bp, synthetic construct
  misc_feature 1..44: note = oligonucleotide decoy
  source 1..44: mol_type = other DNA
aaaatggctccacctgttatgtcacgtgtaaataaacatcggtg

SEQ ID NO: 816 - DNA, 44 bp, synthetic construct
  misc_feature 1..44: note = oligonucleotide decoy
  source 1..44: mol_type = other DNA
aaaatggctccacctgttatgtcacgtgtaaataaacatcgttg

SEQ ID NO: 817 - DNA, 44 bp, synthetic construct
  misc_feature 1..44: note = oligonucleotide decoy
  source 1..44: mol_type = other DNA
aagatggctccacctgttacatcaccgatgtttatttacacgtg

SEQ ID NO: 818 - DNA, 44 bp, synthetic construct
  misc_feature 1..44: note = oligonucleotide decoy
  source 1..44: mol_type = other DNA
aagatggctccacctgttacatcaccgatgtttgtttacacgtg

SEQ ID NO: 819 - DNA, 44 bp, synthetic construct
  misc_feature 1..44: note = oligonucleotide decoy
  source 1..44: mol_type = other DNA
aagatggctccacctgttacatcaccgctgtttatttacacgtg

SEQ ID NO: 820 - DNA, 44 bp, synthetic construct
  misc_feature 1..44: note = oligonucleotide decoy
  source 1..44: mol_type = other DNA
aagatggctccacctgttacatcaccgctgtttgtttacacgtg

SEQ ID NO: 821 - DNA, 44 bp, synthetic construct
  misc_feature 1..44: note = oligonucleotide decoy
  source 1..44: mol_type = other DNA
aagatggctccacctgttacatcaccggtgtttatttacacgtg

SEQ ID NO: 822 - DNA, 44 bp, synthetic construct
  misc_feature 1..44: note = oligonucleotide decoy
  source 1..44: mol_type = other DNA
aagatggctccacctgttacatcaccggtgtttgtttacacgtg

SEQ ID NO: 823 - DNA, 44 bp, synthetic construct
  misc_feature 1..44: note = oligonucleotide decoy
  source 1..44: mol_type = other DNA
aagatggctccacctgttacatcaccgttgtttatttacacgtg

SEQ ID NO: 824 - DNA, 44 bp, synthetic construct
  misc_feature 1..44: note = oligonucleotide decoy
  source 1..44: mol_type = other DNA
aagatggctccacctgttacatcaccgttgtttgtttacacgtg

SEQ ID NO: 825 - DNA, 44 bp, synthetic construct
  misc_feature 1..44: note = oligonucleotide decoy
  source 1..44: mol_type = other DNA
aagatggctccacctgttacatcatcgatgtttatttacacgtg

SEQ ID NO: 826 - DNA, 44 bp, synthetic construct
  misc_feature 1..44: note = oligonucleotide decoy
  source 1..44: mol_type = other DNA
aagatggctccacctgttacatcatcgatgtttgtttacacgtg

SEQ ID NO: 827 - DNA, 44 bp, synthetic construct
  misc_feature 1..44: note = oligonucleotide decoy
  source 1..44: mol_type = other DNA
aagatggctccacctgttacatcatcgctgtttatttacacgtg

SEQ ID NO: 828 - DNA, 44 bp, synthetic construct
  misc_feature 1..44: note = oligonucleotide decoy
  source 1..44: mol_type = other DNA
aagatggctccacctgttacatcatcgctgtttgtttacacgtg

SEQ ID NO: 829 - DNA, 44 bp, synthetic construct
  misc_feature 1..44: note = oligonucleotide decoy
  source 1..44: mol_type = other DNA
aagatggctccacctgttacatcatcggtgtttatttacacgtg

SEQ ID NO: 830 - DNA, 44 bp, synthetic construct
  misc_feature 1..44: note = oligonucleotide decoy
  source 1..44: mol_type = other DNA
aagatggctccacctgttacatcatcggtgtttgtttacacgtg

SEQ ID NO: 831 - DNA, 44 bp, synthetic construct
  misc_feature 1..44: note = oligonucleotide decoy
  source 1..44: mol_type = other DNA
aagatggctccacctgttacatcatcgttgtttatttacacgtg

SEQ ID NO: 832 - DNA, 44 bp, synthetic construct
  misc_feature 1..44: note = oligonucleotide decoy
  source 1..44: mol_type = other DNA
aagatggctccacctgttacatcatcgttgtttgtttacacgtg

SEQ ID NO: 833 - DNA, 44 bp, synthetic construct
  misc_feature 1..44: note = oligonucleotide decoy
  source 1..44: mol_type = other DNA
aagatggctccacctgttacgtcaccgatgtttatttacacgtg

SEQ ID NO: 834 - DNA, 44 bp, synthetic construct
  misc_feature 1..44: note = oligonucleotide decoy
  source 1..44: mol_type = other DNA
aagatggctccacctgttacgtcaccgatgtttgtttacacgtg

SEQ ID NO: 835 - DNA, 44 bp, synthetic construct
  misc_feature 1..44: note = oligonucleotide decoy
  source 1..44: mol_type = other DNA
aagatggctccacctgttacgtcaccgctgtttatttacacgtg

SEQ ID NO: 836 - DNA, 44 bp, synthetic construct
  misc_feature 1..44: note = oligonucleotide decoy
  source 1..44: mol_type = other DNA
aagatggctccacctgttacgtcaccgctgtttgtttacacgtg

SEQ ID NO: 837 - DNA, 44 bp, synthetic construct
  misc_feature 1..44: note = oligonucleotide decoy
  source 1..44: mol_type = other DNA
aagatggctccacctgttacgtcaccggtgtttatttacacgtg

SEQ ID NO: 838 - DNA, 44 bp, synthetic construct
  misc_feature 1..44: note = oligonucleotide decoy
  source 1..44: mol_type = other DNA
aagatggctccacctgttacgtcaccggtgtttgtttacacgtg

SEQ ID NO: 839 - DNA, 44 bp, synthetic construct
  misc_feature 1..44: note = oligonucleotide decoy
  source 1..44: mol_type = other DNA
aagatggctccacctgttacgtcaccgttgtttatttacacgtg

SEQ ID NO: 840 - DNA, 44 bp, synthetic construct
  misc_feature 1..44: note = oligonucleotide decoy
  source 1..44: mol_type = other DNA
aagatggctccacctgttacgtcaccgttgtttgtttacacgtg

SEQ ID NO: 841 - DNA, 44 bp, synthetic construct
  misc_feature 1..44: note = oligonucleotide decoy
  source 1..44: mol_type = other DNA
aagatggctccacctgttacgtcatcgatgtttatttacacgtg

SEQ ID NO: 842 - DNA, 44 bp, synthetic construct
  misc_feature 1..44: note = oligonucleotide decoy
  source 1..44: mol_type = other DNA
aagatggctccacctgttacgtcatcgatgtttgtttacacgtg

SEQ ID NO: 843 - DNA, 44 bp, synthetic construct
  misc_feature 1..44: note = oligonucleotide decoy
  source 1..44: mol_type = other DNA
aagatggctccacctgttacgtcatcgctgtttatttacacgtg

SEQ ID NO: 844 - DNA, 44 bp, synthetic construct
  misc_feature 1..44: note = oligonucleotide decoy
  source 1..44: mol_type = other DNA
aagatggctccacctgttacgtcatcgctgtttgtttacacgtg

SEQ ID NO: 845 - DNA, 44 bp, synthetic construct
  misc_feature 1..44: note = oligonucleotide decoy
  source 1..44: mol_type = other DNA
aagatggctccacctgttacgtcatcggtgtttatttacacgtg

SEQ ID NO: 846 - DNA, 44 bp, synthetic construct
  misc_feature 1..44: note = oligonucleotide decoy
  source 1..44: mol_type = other DNA
aagatggctccacctgttacgtcatcggtgtttgtttacacgtg

SEQ ID NO: 847 - DNA, 44 bp, synthetic construct
  misc_feature 1..44: note = oligonucleotide decoy
  source 1..44: mol_type = other DNA
aagatggctccacctgttacgtcatcgttgtttatttacacgtg

SEQ ID NO: 848 - DNA, 44 bp, synthetic construct
  misc_feature 1..44: note = oligonucleotide decoy
  source 1..44: mol_type = other DNA
aagatggctccacctgttacgtcatcgttgtttgtttacacgtg

SEQ ID NO: 849 - DNA, 44 bp, synthetic construct
  misc_feature 1..44: note = oligonucleotide decoy
  source 1..44: mol_type = other DNA
aagatggctccacctgttatatcaccgatgtttatttacacgtg

SEQ ID NO: 850 - DNA, 44 bp, synthetic construct
  misc_feature 1..44: note = oligonucleotide decoy
  source 1..44: mol_type = other DNA
aagatggctccacctgttatatcaccgatgtttgtttacacgtg

SEQ ID NO: 851 - DNA, 44 bp, synthetic construct
  misc_feature 1..44: note = oligonucleotide decoy
  source 1..44: mol_type = other DNA
aagatggctccacctgttatatcaccgctgtttatttacacgtg

SEQ ID NO: 852 - DNA, 44 bp, synthetic construct
  misc_feature 1..44: note = oligonucleotide decoy
  source 1..44: mol_type = other DNA
aagatggctccacctgttatatcaccgctgtttgtttacacgtg

SEQ ID NO: 853 - DNA, 44 bp, synthetic construct
  misc_feature 1..44: note = oligonucleotide decoy
  source 1..44: mol_type = other DNA
aagatggctccacctgttatatcaccggtgtttatttacacgtg

SEQ ID NO: 854 - DNA, 44 bp, synthetic construct
  misc_feature 1..44: note = oligonucleotide decoy
  source 1..44: mol_type = other DNA
aagatggctccacctgttatatcaccggtgtttgtttacacgtg

SEQ ID NO: 855 - DNA, 44 bp, synthetic construct
  misc_feature 1..44: note = oligonucleotide decoy
  source 1..44: mol_type = other DNA
aagatggctccacctgttatatcaccgttgtttatttacacgtg

SEQ ID NO: 856 - DNA, 44 bp, synthetic construct
  misc_feature 1..44: note = oligonucleotide decoy
  source 1..44: mol_type = other DNA
aagatggctccacctgttatatcaccgttgtttgtttacacgtg

SEQ ID NO: 857 - DNA, 44 bp, synthetic construct
  misc_feature 1..44: note = oligonucleotide decoy
  source 1..44: mol_type = other DNA
aagatggctccacctgttatatcatcgatgtttatttacacgtg

SEQ ID NO: 858 - DNA, 44 bp, synthetic construct
  misc_feature 1..44: note = oligonucleotide decoy
  source 1..44: mol_type = other DNA
aagatggctccacctgttatatcatcgatgtttgtttacacgtg

SEQ ID NO: 859 - DNA, 44 bp, synthetic construct
  misc_feature 1..44: note = oligonucleotide decoy
  source 1..44: mol_type = other DNA
aagatggctccacctgttatatcatcgctgtttatttacacgtg

SEQ ID NO: 860 - DNA, 44 bp, synthetic construct
  misc_feature 1..44: note = oligonucleotide decoy
  source 1..44: mol_type = other DNA
aagatggctccacctgttatatcatcgctgtttgtttacacgtg

SEQ ID NO: 861 - DNA, 44 bp, synthetic construct
  misc_feature 1..44: note = oligonucleotide decoy
  source 1..44: mol_type = other DNA
aagatggctccacctgttatatcatcggtgtttatttacacgtg

SEQ ID NO: 862 - DNA, 44 bp, synthetic construct
  misc_feature 1..44: note = oligonucleotide decoy
  source 1..44: mol_type = other DNA
aagatggctccacctgttatatcatcggtgtttgtttacacgtg

SEQ ID NO: 863 - DNA, 44 bp, synthetic construct
  misc_feature 1..44: note = oligonucleotide decoy
  source 1..44: mol_type = other DNA
aagatggctccacctgttatatcatcgttgtttatttacacgtg

SEQ ID NO: 864 - DNA, 44 bp, synthetic construct
  misc_feature 1..44: note = oligonucleotide decoy
  source 1..44: mol_type = other DNA
aagatggctccacctgttatatcatcgttgtttgtttacacgtg

SEQ ID NO: 865 - DNA, 44 bp, synthetic construct
  misc_feature 1..44: note = oligonucleotide decoy
  source 1..44: mol_type = other DNA
aagatggctccacctgttatgtcaccgatgtttatttacacgtg

SEQ ID NO: 866 - DNA, 44 bp, synthetic construct
  misc_feature 1..44: note = oligonucleotide decoy
  source 1..44: mol_type = other DNA
aagatggctccacctgttatgtcaccgatgtttgtttacacgtg

SEQ ID NO: 867 - DNA, 44 bp, synthetic construct
  misc_feature 1..44: note = oligonucleotide decoy
  source 1..44: mol_type = other DNA
aagatggctccacctgttatgtcaccgctgtttatttacacgtg

SEQ ID NO: 868 - DNA, 44 bp, synthetic construct
  misc_feature 1..44: note = oligonucleotide decoy
  source 1..44: mol_type = other DNA
aagatggctccacctgttatgtcaccgctgtttgtttacacgtg

SEQ ID NO: 869 - DNA, 44 bp, synthetic construct
  misc_feature 1..44: note = oligonucleotide decoy
  source 1..44: mol_type = other DNA
aagatggctccacctgttatgtcaccggtgtttatttacacgtg

SEQ ID NO: 870 - DNA, 44 bp, synthetic construct
  misc_feature 1..44: note = oligonucleotide decoy
  source 1..44: mol_type = other DNA
aagatggctccacctgttatgtcaccggtgtttgtttacacgtg

SEQ ID NO: 871 - DNA, 44 bp, synthetic construct
  misc_feature 1..44: note = oligonucleotide decoy
  source 1..44: mol_type = other DNA
aagatggctccacctgttatgtcaccgttgtttatttacacgtg

SEQ ID NO: 872 - DNA, 44 bp, synthetic construct
  misc_feature 1..44: note = oligonucleotide decoy
  source 1..44: mol_type = other DNA
aagatggctccacctgttatgtcaccgttgtttgtttacacgtg

SEQ ID NO: 873 - DNA, 44 bp, synthetic construct
  misc_feature 1..44: note = oligonucleotide decoy
  source 1..44: mol_type = other DNA
aagatggctccacctgttatgtcatcgatgtttatttacacgtg

SEQ ID NO: 874 - DNA, 44 bp, synthetic construct
  misc_feature 1..44: note = oligonucleotide decoy
  source 1..44: mol_type = other DNA
aagatggctccacctgttatgtcatcgatgtttgtttacacgtg

SEQ ID NO: 875 - DNA, 44 bp, synthetic construct
  misc_feature 1..44: note = oligonucleotide decoy
  source 1..44: mol_type = other DNA
aagatggctccacctgttatgtcatcgctgtttatttacacgtg

SEQ ID NO: 876 - DNA, 44 bp, synthetic construct
  misc_feature 1..44: note = oligonucleotide decoy
  source 1..44: mol_type = other DNA
aagatggctccacctgttatgtcatcgctgtttgtttacacgtg

SEQ ID NO: 877 - DNA, 44 bp, synthetic construct
  misc_feature 1..44: note = oligonucleotide decoy
  source 1..44: mol_type = other DNA
aagatggctccacctgttatgtcatcggtgtttatttacacgtg

SEQ ID NO: 878 - DNA, 44 bp, synthetic construct
  misc_feature 1..44: note = oligonucleotide decoy
  source 1..44: mol_type = other DNA
aagatggctccacctgttatgtcatcggtgtttgtttacacgtg

SEQ ID NO: 879 - DNA, 44 bp, synthetic construct
  misc_feature 1..44: note = oligonucleotide decoy
  source 1..44: mol_type = other DNA
aagatggctccacctgttatgtcatcgttgtttatttacacgtg

SEQ ID NO: 880 - DNA, 44 bp, synthetic construct
  misc_feature 1..44: note = oligonucleotide decoy
  source 1..44: mol_type = other DNA
aagatggctccacctgttatgtcatcgttgtttgtttacacgtg

SEQ ID NO: 881 - DNA, 44 bp, synthetic construct
  misc_feature 1..44: note = oligonucleotide decoy
  source 1..44: mol_type = other DNA
aaaatggctccacctgttacatcaccgatgtttatttacacgtg

SEQ ID NO: 882 - DNA, 44 bp, synthetic construct
  misc_feature 1..44: note = oligonucleotide decoy
  source 1..44: mol_type = other DNA
aaaatggctccacctgttacatcaccgatgtttgtttacacgtg

SEQ ID NO: 883 - DNA, 44 bp, synthetic construct
  misc_feature 1..44: note = oligonucleotide decoy
  source 1..44: mol_type = other DNA
aaaatggctccacctgttacatcaccgctgtttatttacacgtg

SEQ ID NO: 884 - DNA, 44 bp, synthetic construct
  misc_feature 1..44: note = oligonucleotide decoy
  source 1..44: mol_type = other DNA
aaaatggctccacctgttacatcaccgctgtttgtttacacgtg

SEQ ID NO: 885 - DNA, 44 bp, synthetic construct
  misc_feature 1..44: note = oligonucleotide decoy
  source 1..44: mol_type = other DNA
aaaatggctccacctgttacatcaccggtgtttatttacacgtg

SEQ ID NO: 886 - DNA, 44 bp, synthetic construct
  misc_feature 1..44: note = oligonucleotide decoy
  source 1..44: mol_type = other DNA
aaaatggctccacctgttacatcaccggtgtttgtttacacgtg

SEQ ID NO: 887 - DNA, 44 bp, synthetic construct
  misc_feature 1..44: note = oligonucleotide decoy
  source 1..44: mol_type = other DNA
aaaatggctccacctgttacatcaccgttgtttatttacacgtg

SEQ ID NO: 888 - DNA, 44 bp, synthetic construct
  misc_feature 1..44: note = oligonucleotide decoy
  source 1..44: mol_type = other DNA
aaaatggctccacctgttacatcaccgttgtttgtttacacgtg

SEQ ID NO: 889 - DNA, 44 bp, synthetic construct
  misc_feature 1..44: note = oligonucleotide decoy
  source 1..44: mol_type = other DNA
aaaatggctccacctgttacatcatcgatgtttatttacacgtg

SEQ ID NO: 890 - DNA, 44 bp, synthetic construct
  misc_feature 1..44: note = oligonucleotide decoy
  source 1..44: mol_type = other DNA
aaaatggctccacctgttacatcatcgatgtttgtttacacgtg

SEQ ID NO: 891 - DNA, 44 bp, synthetic construct
  misc_feature 1..44: note = oligonucleotide decoy
  source 1..44: mol_type = other DNA
aaaatggctccacctgttacatcatcgctgtttatttacacgtg

SEQ ID NO: 892 - DNA, 44 bp, synthetic construct
  misc_feature 1..44: note = oligonucleotide decoy
  source 1..44: mol_type = other DNA
aaaatggctccacctgttacatcatcgctgtttgtttacacgtg

SEQ ID NO: 893 - DNA, 44 bp, synthetic construct
  misc_feature 1..44: note = oligonucleotide decoy
  source 1..44: mol_type = other DNA
aaaatggctccacctgttacatcatcggtgtttatttacacgtg

SEQ ID NO: 894 - DNA, 44 bp, synthetic construct
  misc_feature 1..44: note = oligonucleotide decoy
  source 1..44: mol_type = other DNA
aaaatggctccacctgttacatcatcggtgtttgtttacacgtg

SEQ ID NO: 895 - DNA, 44 bp, synthetic construct
  misc_feature 1..44: note = oligonucleotide decoy
  source 1..44: mol_type = other DNA
aaaatggctccacctgttacatcatcgttgtttatttacacgtg

SEQ ID NO: 896 - DNA, 44 bp, synthetic construct
  misc_feature 1..44: note = oligonucleotide decoy
  source 1..44: mol_type = other DNA
aaaatggctccacctgttacatcatcgttgtttgtttacacgtg

SEQ ID NO: 897 - DNA, 44 bp, synthetic construct
  misc_feature 1..44: note = oligonucleotide decoy
  source 1..44: mol_type = other DNA
aaaatggctccacctgttacgtcaccgatgtttatttacacgtg

SEQ ID NO: 898 - DNA, 44 bp, synthetic construct
  misc_feature 1..44: note = oligonucleotide decoy
  source 1..44: mol_type = other DNA
aaaatggctccacctgttacgtcaccgatgtttgtttacacgtg

SEQ ID NO: 899 - DNA, 44 bp, synthetic construct
  misc_feature 1..44: note = oligonucleotide decoy
  source 1..44: mol_type = other DNA
aaaatggctccacctgttacgtcaccgctgtttatttacacgtg

SEQ ID NO: 900 - DNA, 44 bp, synthetic construct
  misc_feature 1..44: note = oligonucleotide decoy
  source 1..44: mol_type = other DNA
aaaatggctccacctgttacgtcaccgctgtttgtttacacgtg

SEQ ID NO: 901 - DNA, 44 bp, synthetic construct
  misc_feature 1..44: note = oligonucleotide decoy
  source 1..44: mol_type = other DNA
aaaatggctccacctgttacgtcaccggtgtttatttacacgtg

SEQ ID NO: 902 - DNA, 44 bp, synthetic construct
  misc_feature 1..44: note = oligonucleotide decoy
  source 1..44: mol_type = other DNA
aaaatggctccacctgttacgtcaccggtgtttgtttacacgtg

SEQ ID NO: 903 - DNA, 44 bp, synthetic construct
  misc_feature 1..44: note = oligonucleotide decoy
  source 1..44: mol_type = other DNA
aaaatggctccacctgttacgtcaccgttgtttatttacacgtg

SEQ ID NO: 904 - DNA, 44 bp, synthetic construct
  misc_feature 1..44: note = oligonucleotide decoy
  source 1..44: mol_type = other DNA
aaaatggctccacctgttacgtcaccgttgtttgtttacacgtg

SEQ ID NO: 905 - DNA, 44 bp, synthetic construct
  misc_feature 1..44: note = oligonucleotide decoy
  source 1..44: mol_type = other DNA
aaaatggctccacctgttacgtcatcgatgtttatttacacgtg

SEQ ID NO: 906 - DNA, 44 bp, synthetic construct
  misc_feature 1..44: note = oligonucleotide decoy
  source 1..44: mol_type = other DNA
aaaatggctccacctgttacgtcatcgatgtttgtttacacgtg

SEQ ID NO: 907 - DNA, 44 bp, synthetic construct
  misc_feature 1..44: note = oligonucleotide decoy
  source 1..44: mol_type = other DNA
aaaatggctccacctgttacgtcatcgctgtttatttacacgtg

SEQ ID NO: 908 - DNA, 44 bp, synthetic construct
  misc_feature 1..44: note = oligonucleotide decoy
  source 1..44: mol_type = other DNA
aaaatggctccacctgttacgtcatcgctgtttgtttacacgtg

SEQ ID NO: 909 - DNA, 44 bp, synthetic construct
  misc_feature 1..44: note = oligonucleotide decoy
  source 1..44: mol_type = other DNA
aaaatggctccacctgttacgtcatcggtgtttatttacacgtg

SEQ ID NO: 910 - DNA, 44 bp, synthetic construct
  misc_feature 1..44: note = oligonucleotide decoy
  source 1..44: mol_type = other DNA
aaaatggctccacctgttacgtcatcggtgtttgtttacacgtg

SEQ ID NO: 911 - DNA, 44 bp, synthetic construct
  misc_feature 1..44: note = oligonucleotide decoy
  source 1..44: mol_type = other DNA
aaaatggctccacctgttacgtcatcgttgtttatttacacgtg

SEQ ID NO: 912 - DNA, 44 bp, synthetic construct
  misc_feature 1..44: note = oligonucleotide decoy
  source 1..44: mol_type = other DNA
aaaatggctccacctgttacgtcatcgttgtttgtttacacgtg

SEQ ID NO: 913 - DNA, 44 bp, synthetic construct
  misc_feature 1..44: note = oligonucleotide decoy
  source 1..44: mol_type = other DNA
aaaatggctccacctgttatatcaccgatgtttatttacacgtg

SEQ ID NO: 914 - DNA, 44 bp, synthetic construct
  misc_feature 1..44: note = oligonucleotide decoy
  source 1..44: mol_type = other DNA
aaaatggctccacctgttatatcaccgatgtttgtttacacgtg

SEQ ID NO: 915 - DNA, 44 bp, synthetic construct
  misc_feature 1..44: note = oligonucleotide decoy
  source 1..44: mol_type = other DNA
aaaatggctccacctgttatatcaccgctgtttatttacacgtg

SEQ ID NO: 916 - DNA, 44 bp, synthetic construct
  misc_feature 1..44: note = oligonucleotide decoy
  source 1..44: mol_type = other DNA
aaaatggctccacctgttatatcaccgctgtttgtttacacgtg

SEQ ID NO: 917 - DNA, 44 bp, synthetic construct
  misc_feature 1..44: note = oligonucleotide decoy
  source 1..44: mol_type = other DNA
aaaatggctccacctgttatatcaccggtgtttatttacacgtg

SEQ ID NO: 918 - DNA, 44 bp, synthetic construct
  misc_feature 1..44: note = oligonucleotide decoy
  source 1..44: mol_type = other DNA
aaaatggctccacctgttatatcaccggtgtttgtttacacgtg

SEQ ID NO: 919 - DNA, 44 bp, synthetic construct
  misc_feature 1..44: note = oligonucleotide decoy
  source 1..44: mol_type = other DNA
aaaatggctccacctgttatatcaccgttgtttatttacacgtg

SEQ ID NO: 920 - DNA, 44 bp, synthetic construct
  misc_feature 1..44: note = oligonucleotide decoy
  source 1..44: mol_type = other DNA
aaaatggctccacctgttatatcaccgttgtttgtttacacgtg

SEQ ID NO: 921 - DNA, 44 bp, synthetic construct
  misc_feature 1..44: note = oligonucleotide decoy
  source 1..44: mol_type = other DNA
aaaatggctccacctgttatatcatcgatgtttatttacacgtg

SEQ ID NO: 922 - DNA, 44 bp, synthetic construct
  misc_feature 1..44: note = oligonucleotide decoy
  source 1..44: mol_type = other DNA
aaaatggctccacctgttatatcatcgatgtttgtttacacgtg

SEQ ID NO: 923 - DNA, 44 bp, synthetic construct
  misc_feature 1..44: note = oligonucleotide decoy
  source 1..44: mol_type = other DNA
aaaatggctccacctgttatatcatcgctgtttatttacacgtg

SEQ ID NO: 924 - DNA, 44 bp, synthetic construct
  misc_feature 1..44: note = oligonucleotide decoy
  source 1..44: mol_type = other DNA
aaaatggctccacctgttatatcatcgctgtttgtttacacgtg

SEQ ID NO: 925 - DNA, 44 bp, synthetic construct
  misc_feature 1..44: note = oligonucleotide decoy
  source 1..44: mol_type = other DNA
aaaatggctccacctgttatatcatcggtgtttatttacacgtg

SEQ ID NO: 926 - DNA, 44 bp, synthetic construct
  misc_feature 1..44: note = oligonucleotide decoy
  source 1..44: mol_type = other DNA
aaaatggctccacctgttatatcatcggtgtttgtttacacgtg

SEQ ID NO: 927 - DNA, 44 bp, synthetic construct
  misc_feature 1..44: note = oligonucleotide decoy
  source 1..44: mol_type = other DNA
aaaatggctccacctgttatatcatcgttgtttatttacacgtg

SEQ ID NO: 928 - DNA, 44 bp, synthetic construct
  misc_feature 1..44: note = oligonucleotide decoy
  source 1..44: mol_type = other DNA
aaaatggctccacctgttatatcatcgttgtttgtttacacgtg

SEQ ID NO: 929 - DNA, 44 bp, synthetic construct
  misc_feature 1..44: note = oligonucleotide decoy
  source 1..44: mol_type = other DNA
aaaatggctccacctgttatgtcaccgatgtttatttacacgtg

SEQ ID NO: 930 - DNA, 44 bp, synthetic construct
  misc_feature 1..44: note = oligonucleotide decoy
  source 1..44: mol_type = other DNA
aaaatggctccacctgttatgtcaccgatgtttgtttacacgtg

SEQ ID NO: 931 - DNA, 44 bp, synthetic construct
  misc_feature 1..44: note = oligonucleotide decoy
  source 1..44: mol_type = other DNA
aaaatggctccacctgttatgtcaccgctgtttatttacacgtg

SEQ ID NO: 932 - DNA, 44 bp, synthetic construct
  misc_feature 1..44: note = oligonucleotide decoy
  source 1..44: mol_type = other DNA
aaaatggctccacctgttatgtcaccgctgtttgtttacacgtg

SEQ ID NO: 933 - DNA, 44 bp, synthetic construct
  misc_feature 1..44: note = oligonucleotide decoy
  source 1..44: mol_type = other DNA
aaaatggctccacctgttatgtcaccggtgtttatttacacgtg

SEQ ID NO: 934 - DNA, 44 bp, synthetic construct
  misc_feature 1..44: note = oligonucleotide decoy
  source 1..44: mol_type = other DNA
aaaatggctccacctgttatgtcaccggtgtttgtttacacgtg

SEQ ID NO: 935 - DNA, 44 bp, synthetic construct
  misc_feature 1..44: note = oligonucleotide decoy
  source 1..44: mol_type = other DNA
aaaatggctccacctgttatgtcaccgttgtttatttacacgtg

SEQ ID NO: 936 - DNA, 44 bp, synthetic construct
  misc_feature 1..44: note = oligonucleotide decoy
  source 1..44: mol_type = other DNA
aaaatggctccacctgttatgtcaccgttgtttgtttacacgtg

SEQ ID NO: 937 - DNA, 44 bp, synthetic construct
  misc_feature 1..44: note = oligonucleotide decoy
  source 1..44: mol_type = other DNA
aaaatggctccacctgttatgtcatcgatgtttatttacacgtg

SEQ ID NO: 938 - DNA, 44 bp, synthetic construct
  misc_feature 1..44: note = oligonucleotide decoy
  source 1..44: mol_type = other DNA
aaaatggctccacctgttatgtcatcgatgtttgtttacacgtg

SEQ ID NO: 939 - DNA, 44 bp, synthetic construct
  misc_feature 1..44: note = oligonucleotide decoy
  source 1..44: mol_type = other DNA
aaaatggctccacctgttatgtcatcgctgtttatttacacgtg

SEQ ID NO: 940 - DNA, 44 bp, synthetic construct
  misc_feature 1..44: note = oligonucleotide decoy
  source 1..44: mol_type = other DNA
aaaatggctccacctgttatgtcatcgctgtttgtttacacgtg

SEQ ID NO: 941 - DNA, 44 bp, synthetic construct
  misc_feature 1..44: note = oligonucleotide decoy
  source 1..44: mol_type = other DNA
aaaatggctccacctgttatgtcatcggtgtttatttacacgtg

SEQ ID NO: 942 - DNA, 44 bp, synthetic construct
  misc_feature 1..44: note = oligonucleotide decoy
  source 1..44: mol_type = other DNA
aaaatggctccacctgttatgtcatcggtgtttgtttacacgtg

SEQ ID NO: 943 - DNA, 44 bp, synthetic construct
  misc_feature 1..44: note = oligonucleotide decoy
  source 1..44: mol_type = other DNA
aaaatggctccacctgttatgtcatcgttgtttatttacacgtg

SEQ ID NO: 944 - DNA, 44 bp, synthetic construct
  misc_feature 1..44: note = oligonucleotide decoy
  source 1..44: mol_type = other DNA
aaaatggctccacctgttatgtcatcgttgtttgtttacacgtg

SEQ ID NO: 945 - DNA, 44 bp, synthetic construct
  misc_feature 1..44: note = oligonucleotide decoy
  source 1..44: mol_type = other DNA
aagatggctccatcgatgtttatttacacgtgacataacacctg

SEQ ID NO: 946 - DNA, 44 bp, synthetic construct
  misc_feature 1..44: note = oligonucleotide decoy
  source 1..44: mol_type = other DNA
aagatggctccatcgatgtttatttacacgtgacgtaacacctg

SEQ ID NO: 947 - DNA, 44 bp, synthetic construct
  misc_feature 1..44: note = oligonucleotide decoy
  source 1..44: mol_type = other DNA
aagatggctccatcgatgtttatttacacgtgatataacacctg

SEQ ID NO: 948 - DNA, 44 bp, synthetic construct
  misc_feature 1..44: note = oligonucleotide decoy
  source 1..44: mol_type = other DNA
aagatggctccatcgatgtttatttacacgtgatgtaacacctg

SEQ ID NO: 949 - DNA, 44 bp, synthetic construct
  misc_feature 1..44: note = oligonucleotide decoy
  source 1..44: mol_type = other DNA
aagatggctccatcgatgtttgtttacacgtgacataacacctg

SEQ ID NO: 950 - DNA, 44 bp, synthetic construct
  misc_feature 1..44: note = oligonucleotide decoy
  source 1..44: mol_type = other DNA
aagatggctccatcgatgtttgtttacacgtgacgtaacacctg

SEQ ID NO: 951 - DNA, 44 bp, synthetic construct
  misc_feature 1..44: note = oligonucleotide decoy
  source 1..44: mol_type = other DNA
aagatggctccatcgatgtttgtttacacgtgatataacacctg

SEQ ID NO: 952 - DNA, 44 bp, synthetic construct
  misc_feature 1..44: note = oligonucleotide decoy
  source 1..44: mol_type = other DNA
aagatggctccatcgatgtttgtttacacgtgatgtaacacctg

SEQ ID NO: 953 - DNA, 44 bp, synthetic construct
  misc_feature 1..44: note = oligonucleotide decoy
  source 1..44: mol_type = other DNA
aagatggctccatcgctgtttatttacacgtgacataacacctg

SEQ ID NO: 954 - DNA, 44 bp, synthetic construct
  misc_feature 1..44: note = oligonucleotide decoy
  source 1..44: mol_type = other DNA
aagatggctccatcgctgtttatttacacgtgacgtaacacctg

SEQ ID NO: 955 - DNA, 44 bp, synthetic construct
  misc_feature 1..44: note = oligonucleotide decoy
  source 1..44: mol_type = other DNA
aagatggctccatcgctgtttatttacacgtgatataacacctg

SEQ ID NO: 956 - DNA, 44 bp, synthetic construct
  misc_feature 1..44: note = oligonucleotide decoy
  source 1..44: mol_type = other DNA
aagatggctccatcgctgtttatttacacgtgatgtaacacctg

SEQ ID NO: 957 - DNA, 44 bp, synthetic construct
  misc_feature 1..44: note = oligonucleotide decoy
  source 1..44: mol_type = other DNA
aagatggctccatcgctgtttgtttacacgtgacataacacctg

SEQ ID NO: 958 - DNA, 44 bp, synthetic construct
  misc_feature 1..44: note = oligonucleotide decoy
  source 1..44: mol_type = other DNA
aagatggctccatcgctgtttgtttacacgtgacgtaacacctg

SEQ ID NO: 959 - DNA, 44 bp, synthetic construct
  misc_feature 1..44: note = oligonucleotide decoy
  source 1..44: mol_type = other DNA
aagatggctccatcgctgtttgtttacacgtgatataacacctg

SEQ ID NO: 960 - DNA, 44 bp, synthetic construct
  misc_feature 1..44: note = oligonucleotide decoy
  source 1..44: mol_type = other DNA
aagatggctccatcgctgtttgtttacacgtgatgtaacacctg

SEQ ID NO: 961 - DNA, 44 bp, synthetic construct
  misc_feature 1..44: note = oligonucleotide decoy
  source 1..44: mol_type = other DNA
aagatggctccatcggtgtttatttacacgtgacataacacctg

SEQ ID NO: 962 - DNA, 44 bp, synthetic construct
  misc_feature 1..44: note = oligonucleotide decoy
  source 1..44: mol_type = other DNA
aagatggctccatcggtgtttatttacacgtgacgtaacacctg

SEQ ID NO: 963 - DNA, 44 bp, synthetic construct
  misc_feature 1..44: note = oligonucleotide decoy
  source 1..44: mol_type = other DNA
aagatggctccatcggtgtttatttacacgtgatataacacctg

SEQ ID NO: 964 - DNA, 44 bp, synthetic construct
  misc_feature 1..44: note = oligonucleotide decoy
  source 1..44: mol_type = other DNA
aagatggctccatcggtgtttatttacacgtgatgtaacacctg

SEQ ID NO: 965 - DNA, 44 bp, synthetic construct
  misc_feature 1..44: note = oligonucleotide decoy
  source 1..44: mol_type = other DNA
aagatggctccatcggtgtttgtttacacgtgacataacacctg

SEQ ID NO: 966 - DNA, 44 bp, synthetic construct
  misc_feature 1..44: note = oligonucleotide decoy
  source 1..44: mol_type = other DNA
aagatggctccatcggtgtttgtttacacgtgacgtaacacctg

SEQ ID NO: 967 - DNA, 44 bp, synthetic construct
  misc_feature 1..44: note = oligonucleotide decoy
  source 1..44: mol_type = other DNA
aagatggctccatcggtgtttgtttacacgtgatataacacctg

SEQ ID NO: 968 - DNA, 44 bp, synthetic construct
  misc_feature 1..44: note = oligonucleotide decoy
  source 1..44: mol_type = other DNA
aagatggctccatcggtgtttgtttacacgtgatgtaacacctg

SEQ ID NO: 969 - DNA, 44 bp, synthetic construct
  misc_feature 1..44: note = oligonucleotide decoy
  source 1..44: mol_type = other DNA
aagatggctccatcgttgtttatttacacgtgacataacacctg

SEQ ID NO: 970 - DNA, 44 bp, synthetic construct
  misc_feature 1..44: note = oligonucleotide decoy
  source 1..44: mol_type = other DNA
aagatggctccatcgttgtttatttacacgtgacgtaacacctg

SEQ ID NO: 971 - DNA, 44 bp, synthetic construct
  misc_feature 1..44: note = oligonucleotide decoy
  source 1..44: mol_type = other DNA
aagatggctccatcgttgtttatttacacgtgatataacacctg

SEQ ID NO: 972 - DNA, 44 bp, synthetic construct
  misc_feature 1..44: note = oligonucleotide decoy
  source 1..44: mol_type = other DNA
aagatggctccatcgttgtttatttacacgtgatgtaacacctg

SEQ ID NO: 973 - DNA, 44 bp, synthetic construct
  misc_feature 1..44: note = oligonucleotide decoy
  source 1..44: mol_type = other DNA
aagatggctccatcgttgtttgtttacacgtgacataacacctg

SEQ ID NO: 974 - DNA, 44 bp, synthetic construct
  misc_feature 1..44: note = oligonucleotide decoy
  source 1..44: mol_type = other DNA
aagatggctccatcgttgtttgtttacacgtgacgtaacacctg

SEQ ID NO: 975 - DNA, 44 bp, synthetic construct
  misc_feature 1..44: note = oligonucleotide decoy
  source 1..44: mol_type = other DNA
aagatggctccatcgttgtttgtttacacgtgatataacacctg

SEQ ID NO: 976 - DNA, 44 bp, synthetic construct
  misc_feature 1..44: note = oligonucleotide decoy
  source 1..44: mol_type = other DNA
aagatggctccatcgttgtttgtttacacgtgatgtaacacctg

SEQ ID NO: 977 - DNA, 44 bp, synthetic construct
  misc_feature 1..44: note = oligonucleotide decoy
  source 1..44: mol_type = other DNA
aaaatggctccatcgatgtttatttacacgtgacataacacctg

SEQ ID NO: 978 - DNA, 44 bp, synthetic construct
  misc_feature 1..44: note = oligonucleotide decoy
  source 1..44: mol_type = other DNA
aaaatggctccatcgatgtttatttacacgtgacgtaacacctg

SEQ ID NO: 979 - DNA, 44 bp, synthetic construct
  misc_feature 1..44: note = oligonucleotide decoy
  source 1..44: mol_type = other DNA
aaaatggctccatcgatgtttatttacacgtgatataacacctg

SEQ ID NO: 980 - DNA, 44 bp, synthetic construct
  misc_feature 1..44: note = oligonucleotide decoy
  source 1..44: mol_type = other DNA
aaaatggctccatcgatgtttatttacacgtgatgtaacacctg

SEQ ID NO: 981 - DNA, 44 bp, synthetic construct
  misc_feature 1..44: note = oligonucleotide decoy
  source 1..44: mol_type = other DNA
aaaatggctccatcgatgtttgtttacacgtgacataacacctg

SEQ ID NO: 982 - DNA, 44 bp, synthetic construct
  misc_feature 1..44: note = oligonucleotide decoy
  source 1..44: mol_type = other DNA
aaaatggctccatcgatgtttgtttacacgtgacgtaacacctg

SEQ ID NO: 983 - DNA, 44 bp, synthetic construct
  misc_feature 1..44: note = oligonucleotide decoy
  source 1..44: mol_type = other DNA
aaaatggctccatcgatgtttgtttacacgtgatataacacctg

SEQ ID NO: 984 - DNA, 44 bp, synthetic construct
  misc_feature 1..44: note = oligonucleotide decoy
  source 1..44: mol_type = other DNA
aaaatggctccatcgatgtttgtttacacgtgatgtaacacctg

SEQ ID NO: 985 - DNA, 44 bp, synthetic construct
  misc_feature 1..44: note = oligonucleotide decoy
  source 1..44: mol_type = other DNA
aaaatggctccatcgctgtttatttacacgtgacataacacctg

SEQ ID NO: 986 - DNA, 44 bp, synthetic construct
  misc_feature 1..44: note = oligonucleotide decoy
  source 1..44: mol_type = other DNA
aaaatggctccatcgctgtttatttacacgtgacgtaacacctg

SEQ ID NO: 987 - DNA, 44 bp, synthetic construct
  misc_feature 1..44: note = oligonucleotide decoy
  source 1..44: mol_type = other DNA
aaaatggctccatcgctgtttatttacacgtgatataacacctg

SEQ ID NO: 988 - DNA, 44 bp, synthetic construct
  misc_feature 1..44: note = oligonucleotide decoy
  source 1..44: mol_type = other DNA
aaaatggctccatcgctgtttatttacacgtgatgtaacacctg

SEQ ID NO: 989 - DNA, 44 bp, synthetic construct
  misc_feature 1..44: note = oligonucleotide decoy
  source 1..44: mol_type = other DNA
aaaatggctccatcgctgtttgtttacacgtgacataacacctg

SEQ ID NO: 990 - DNA, 44 bp, synthetic construct
  misc_feature 1..44: note = oligonucleotide decoy
  source 1..44: mol_type = other DNA
aaaatggctccatcgctgtttgtttacacgtgacgtaacacctg

SEQ ID NO: 991 - DNA, 44 bp, synthetic construct
  misc_feature 1..44: note = oligonucleotide decoy
  source 1..44: mol_type = other DNA
aaaatggctccatcgctgtttgtttacacgtgatataacacctg

SEQ ID NO: 992 - DNA, 44 bp, synthetic construct
  misc_feature 1..44: note = oligonucleotide decoy
  source 1..44: mol_type = other DNA
aaaatggctccatcgctgtttgtttacacgtgatgtaacacctg

SEQ ID NO: 993 - DNA, 44 bp, synthetic construct
  misc_feature 1..44: note = oligonucleotide decoy
  source 1..44: mol_type = other DNA
aaaatggctccatcggtgtttatttacacgtgacataacacctg

SEQ ID NO: 994 - DNA, 44 bp, synthetic construct
  misc_feature 1..44: note = oligonucleotide decoy
  source 1..44: mol_type = other DNA
aaaatggctccatcggtgtttatttacacgtgacgtaacacctg

SEQ ID NO: 995 - DNA, 44 bp, synthetic construct
  misc_feature 1..44: note = oligonucleotide decoy
  source 1..44: mol_type = other DNA
aaaatggctccatcggtgtttatttacacgtgatataacacctg

SEQ ID NO: 996 - DNA, 44 bp, synthetic construct
  misc_feature 1..44: note = oligonucleotide decoy
  source 1..44: mol_type = other DNA
aaaatggctccatcggtgtttatttacacgtgatgtaacacctg

SEQ ID NO: 997 - DNA, 44 bp, synthetic construct
  misc_feature 1..44: note = oligonucleotide decoy
  source 1..44: mol_type = other DNA
aaaatggctccatcggtgtttgtttacacgtgacataacacctg

SEQ ID NO: 998 - DNA, 44 bp, synthetic construct
  misc_feature 1..44: note = oligonucleotide decoy
  source 1..44: mol_type = other DNA
aaaatggctccatcggtgtttgtttacacgtgacgtaacacctg

SEQ ID NO: 999 - DNA, 44 bp, synthetic construct
  misc_feature 1..44: note = oligonucleotide decoy
  source 1..44: mol_type = other DNA
aaaatggctccatcggtgtttgtttacacgtgatataacacctg

SEQ ID NO: 1000 - DNA, 44 bp, synthetic construct
  misc_feature 1..44: note = oligonucleotide decoy
  source 1..44: mol_type = other DNA
aaaatggctccatcggtgtttgtttacacgtgatgtaacacctg

SEQ ID NO: 1001 - DNA, 44 bp, synthetic construct
  misc_feature 1..44: note = oligonucleotide decoy
  source 1..44: mol_type = other DNA
aaaatggctccatcgttgtttatttacacgtgacataacacctg

SEQ ID NO: 1002 - DNA, 44 bp, synthetic construct
  misc_feature 1..44: note = oligonucleotide decoy
  source 1..44: mol_type = other DNA
aaaatggctccatcgttgtttatttacacgtgacgtaacacctg

SEQ ID NO: 1003 - DNA, 44 bp, synthetic construct
  misc_feature 1..44: note = oligonucleotide decoy
  source 1..44: mol_type = other DNA
aaaatggctccatcgttgtttatttacacgtgatataacacctg

SEQ ID NO: 1004 - DNA, 44 bp, synthetic construct
  misc_feature 1..44: note = oligonucleotide decoy
  source 1..44: mol_type = other DNA
aaaatggctccatcgttgtttatttacacgtgatgtaacacctg

SEQ ID NO: 1005 - DNA, 44 bp, synthetic construct
  misc_feature 1..44: note = oligonucleotide decoy
  source 1..44: mol_type = other DNA
aaaatggctccatcgttgtttgtttacacgtgacataacacctg

SEQ ID NO: 1006 - DNA, 44 bp, synthetic construct
  misc_feature 1..44: note = oligonucleotide decoy
  source 1..44: mol_type = other DNA
aaaatggctccatcgttgtttgtttacacgtgacgtaacacctg

SEQ ID NO: 1007 - DNA, 44 bp, synthetic construct
  misc_feature 1..44: note = oligonucleotide decoy
  source 1..44: mol_type = other DNA
aaaatggctccatcgttgtttgtttacacgtgatataacacctg

SEQ ID NO: 1008 - DNA, 44 bp, synthetic construct
  misc_feature 1..44: note = oligonucleotide decoy
  source 1..44: mol_type = other DNA
aaaatggctccatcgttgtttgtttacacgtgatgtaacacctg

SEQ ID NO: 1009 - DNA, 44 bp, synthetic construct
  misc_feature 1..44: note = oligonucleotide decoy
  source 1..44: mol_type = other DNA
aagatggctccaccgatgtttatttacacgtgacataacacctg

SEQ ID NO: 1010 - DNA, 44 bp, synthetic construct
  misc_feature 1..44: note = oligonucleotide decoy
  source 1..44: mol_type = other DNA
aagatggctccaccgatgtttatttacacgtgacgtaacacctg

SEQ ID NO: 1011 - DNA, 44 bp, synthetic construct
  misc_feature 1..44: note = oligonucleotide decoy
  source 1..44: mol_type = other DNA
aagatggctccaccgatgtttatttacacgtgatataacacctg

SEQ ID NO: 1012 - DNA, 44 bp, synthetic construct
  misc_feature 1..44: note = oligonucleotide decoy
  source 1..44: mol_type = other DNA
aagatggctccaccgatgtttatttacacgtgatgtaacacctg

SEQ ID NO: 1013 - DNA, 44 bp, synthetic construct
  misc_feature 1..44: note = oligonucleotide decoy
  source 1..44: mol_type = other DNA
aagatggctccaccgatgtttgtttacacgtgacataacacctg

SEQ ID NO: 1014 - DNA, 44 bp, synthetic construct
  misc_feature 1..44: note = oligonucleotide decoy
  source 1..44: mol_type = other DNA
aagatggctccaccgatgtttgtttacacgtgacgtaacacctg

SEQ ID NO: 1015 - DNA, 44 bp, synthetic construct
  misc_feature 1..44: note = oligonucleotide decoy
  source 1..44: mol_type = other DNA
aagatggctccaccgatgtttgtttacacgtgatataacacctg

SEQ ID NO: 1016 - DNA, 44 bp, synthetic construct
  misc_feature 1..44: note = oligonucleotide decoy
  source 1..44: mol_type = other DNA
aagatggctccaccgatgtttgtttacacgtgatgtaacacctg

SEQ ID NO: 1017 - DNA, 44 bp, synthetic construct
  misc_feature 1..44: note = oligonucleotide decoy
  source 1..44: mol_type = other DNA
aagatggctccaccgctgtttatttacacgtgacataacacctg

SEQ ID NO: 1018 - DNA, 44 bp, synthetic construct
  misc_feature 1..44: note = oligonucleotide decoy
  source 1..44: mol_type = other DNA
aagatggctccaccgctgtttatttacacgtgacgtaacacctg

SEQ ID NO: 1019 - DNA, 44 bp, synthetic construct
  misc_feature 1..44: note = oligonucleotide decoy
  source 1..44: mol_type = other DNA
aagatggctccaccgctgtttatttacacgtgatataacacctg

SEQ ID NO: 1020 - DNA, 44 bp, synthetic construct
  misc_feature 1..44: note = oligonucleotide decoy
  source 1..44: mol_type = other DNA
aagatggctccaccgctgtttatttacacgtgatgtaacacctg

SEQ ID NO: 1021 - DNA, 44 bp, synthetic construct
  misc_feature 1..44: note = oligonucleotide decoy
  source 1..44: mol_type = other DNA
aagatggctccaccgctgtttgtttacacgtgacataacacctg

SEQ ID NO: 1022 - DNA, 44 bp, synthetic construct
  misc_feature 1..44: note = oligonucleotide decoy
  source 1..44: mol_type = other DNA
aagatggctccaccgctgtttgtttacacgtgacgtaacacctg

SEQ ID NO: 1023 - DNA, 44 bp, synthetic construct
  misc_feature 1..44: note = oligonucleotide decoy
  source 1..44: mol_type = other DNA
aagatggctccaccgctgtttgtttacacgtgatataacacctg

SEQ ID NO: 1024 - DNA, 44 bp, synthetic construct
  misc_feature 1..44: note = oligonucleotide decoy
  source 1..44: mol_type = other DNA
aagatggctccaccgctgtttgtttacacgtgatgtaacacctg

SEQ ID NO: 1025 - DNA, 44 bp, synthetic construct
  misc_feature 1..44: note = oligonucleotide decoy
  source 1..44: mol_type = other DNA
aagatggctccaccggtgtttatttacacgtgacataacacctg

SEQ ID NO: 1026 - DNA, 44 bp, synthetic construct
  misc_feature 1..44: note = oligonucleotide decoy
  source 1..44: mol_type = other DNA
aagatggctccaccggtgtttatttacacgtgacgtaacacctg

SEQ ID NO: 1027 - DNA, 44 bp, synthetic construct
  misc_feature 1..44: note = oligonucleotide decoy
  source 1..44: mol_type = other DNA
aagatggctccaccggtgtttatttacacgtgatataacacctg

SEQ ID NO: 1028 - DNA, 44 bp, synthetic construct
  misc_feature 1..44: note = oligonucleotide decoy
  source 1..44: mol_type = other DNA
aagatggctccaccggtgtttatttacacgtgatgtaacacctg

SEQ ID NO: 1029 - DNA, 44 bp, synthetic construct
  misc_feature 1..44: note = oligonucleotide decoy
  source 1..44: mol_type = other DNA
aagatggctccaccggtgtttgtttacacgtgacataacacctg

SEQ ID NO: 1030 - DNA, 44 bp, synthetic construct
  misc_feature 1..44: note = oligonucleotide decoy
  source 1..44: mol_type = other DNA
aagatggctccaccggtgtttgtttacacgtgacgtaacacctg

SEQ ID NO: 1031 - DNA, 44 bp, synthetic construct
  misc_feature 1..44: note = oligonucleotide decoy
  source 1..44: mol_type = other DNA
aagatggctccaccggtgtttgtttacacgtgatataacacctg

SEQ ID NO: 1032 - DNA, 44 bp, synthetic construct
  misc_feature 1..44: note = oligonucleotide decoy
  source 1..44: mol_type = other DNA
aagatggctccaccggtgtttgtttacacgtgatgtaacacctg

SEQ ID NO: 1033 - DNA, 44 bp, synthetic construct
  misc_feature 1..44: note = oligonucleotide decoy
  source 1..44: mol_type = other DNA
aagatggctccaccgttgtttatttacacgtgacataacacctg

SEQ ID NO: 1034 - DNA, 44 bp, synthetic construct
  misc_feature 1..44: note = oligonucleotide decoy
  source 1..44: mol_type = other DNA
aagatggctccaccgttgtttatttacacgtgacgtaacacctg

SEQ ID NO: 1035 - DNA, 44 bp, synthetic construct
  misc_feature 1..44: note = oligonucleotide decoy
  source 1..44: mol_type = other DNA
aagatggctccaccgttgtttatttacacgtgatataacacctg

SEQ ID NO: 1036 - DNA, 44 bp, synthetic construct
  misc_feature 1..44: note = oligonucleotide decoy
  source 1..44: mol_type = other DNA
aagatggctccaccgttgtttatttacacgtgatgtaacacctg

SEQ ID NO: 1037 - DNA, 44 bp, synthetic construct
  misc_feature 1..44: note = oligonucleotide decoy
  source 1..44: mol_type = other DNA
aagatggctccaccgttgtttgtttacacgtgacataacacctg

SEQ ID NO: 1038 - DNA, 44 bp, synthetic construct
  misc_feature 1..44: note = oligonucleotide decoy
  source 1..44: mol_type = other DNA
aagatggctccaccgttgtttgtttacacgtgacgtaacacctg

SEQ ID NO: 1039 - DNA, 44 bp, synthetic construct
  misc_feature 1..44: note = oligonucleotide decoy
  source 1..44: mol_type = other DNA
aagatggctccaccgttgtttgtttacacgtgatataacacctg

SEQ ID NO: 1040 - DNA, 44 bp, synthetic construct
  misc_feature 1..44: note = oligonucleotide decoy
  source 1..44: mol_type = other DNA
aagatggctccaccgttgtttgtttacacgtgatgtaacacctg

SEQ ID NO: 1041 - DNA, 44 bp, synthetic construct
  misc_feature 1..44: note = oligonucleotide decoy
  source 1..44: mol_type = other DNA
aaaatggctccaccgatgtttatttacacgtgacataacacctg

SEQ ID NO: 1042 - DNA, 44 bp, synthetic construct
  misc_feature 1..44: note = oligonucleotide decoy
  source 1..44: mol_type = other DNA
aaaatggctccaccgatgtttatttacacgtgacgtaacacctg

SEQ ID NO: 1043 - DNA, 44 bp, synthetic construct
  misc_feature 1..44: note = oligonucleotide decoy
  source 1..44: mol_type = other DNA
aaaatggctccaccgatgtttatttacacgtgatataacacctg

SEQ ID NO: 1044 - DNA, 44 bp, synthetic construct
  misc_feature 1..44: note = oligonucleotide decoy
  source 1..44: mol_type = other DNA
aaaatggctccaccgatgtttatttacacgtgatgtaacacctg

SEQ ID NO: 1045 - DNA, 44 bp, synthetic construct
  misc_feature 1..44: note = oligonucleotide decoy
  source 1..44: mol_type = other DNA
aaaatggctccaccgatgtttgtttacacgtgacataacacctg

SEQ ID NO: 1046 - DNA, 44 bp, synthetic construct
  misc_feature 1..44: note = oligonucleotide decoy
  source 1..44: mol_type = other DNA
aaaatggctccaccgatgtttgtttacacgtgacgtaacacctg

SEQ ID NO: 1047 - DNA, 44 bp, synthetic construct
  misc_feature 1..44: note = oligonucleotide decoy
  source 1..44: mol_type = other DNA
aaaatggctccaccgatgtttgtttacacgtgatataacacctg

SEQ ID NO: 1048 - DNA, 44 bp, synthetic construct
  misc_feature 1..44: note = oligonucleotide decoy
  source 1..44: mol_type = other DNA
aaaatggctccaccgatgtttgtttacacgtgatgtaacacctg

SEQ ID NO: 1049 - DNA, 44 bp, synthetic construct
  misc_feature 1..44: note = oligonucleotide decoy
  source 1..44: mol_type = other DNA
aaaatggctccaccgctgtttatttacacgtgacataacacctg

SEQ ID NO: 1050 - DNA, 44 bp, synthetic construct
  misc_feature 1..44: note = oligonucleotide decoy
  source 1..44: mol_type = other DNA
aaaatggctccaccgctgtttatttacacgtgacgtaacacctg

SEQ ID NO: 1051 - DNA, 44 bp, synthetic construct
  misc_feature 1..44: note = oligonucleotide decoy
  source 1..44: mol_type = other DNA
aaaatggctccaccgctgtttatttacacgtgatataacacctg

SEQ ID NO: 1052 - DNA, 44 bp, synthetic construct
  misc_feature 1..44: note = oligonucleotide decoy
  source 1..44: mol_type = other DNA
aaaatggctccaccgctgtttatttacacgtgatgtaacacctg

SEQ ID NO: 1053 - DNA, 44 bp, synthetic construct
  misc_feature 1..44: note = oligonucleotide decoy
  source 1..44: mol_type = other DNA
aaaatggctccaccgctgtttgtttacacgtgacataacacctg

SEQ ID NO: 1054 - DNA, 44 bp, synthetic construct
  misc_feature 1..44: note = oligonucleotide decoy
  source 1..44: mol_type = other DNA
aaaatggctccaccgctgtttgtttacacgtgacgtaacacctg

SEQ ID NO: 1055 - DNA, 44 bp, synthetic construct
  misc_feature 1..44: note = oligonucleotide decoy
  source 1..44: mol_type = other DNA
aaaatggctccaccgctgtttgtttacacgtgatataacacctg

SEQ ID NO: 1056 - DNA, 44 bp, synthetic construct
  misc_feature 1..44: note = oligonucleotide decoy
  source 1..44: mol_type = other DNA
aaaatggctccaccgctgtttgtttacacgtgatgtaacacctg

SEQ ID NO: 1057 - DNA, 44 bp, synthetic construct
  misc_feature 1..44: note = oligonucleotide decoy
  source 1..44: mol_type = other DNA
aaaatggctccaccggtgtttatttacacgtgacataacacctg

SEQ ID NO: 1058 - DNA, 44 bp, synthetic construct
  misc_feature 1..44: note = oligonucleotide decoy
  source 1..44: mol_type = other DNA
aaaatggctccaccggtgtttatttacacgtgacgtaacacctg

SEQ ID NO: 1059 - DNA, 44 bp, synthetic construct
  misc_feature 1..44: note = oligonucleotide decoy
  source 1..44: mol_type = other DNA
aaaatggctccaccggtgtttatttacacgtgatataacacctg

SEQ ID NO: 1060 - DNA, 44 bp, synthetic construct
  misc_feature 1..44: note = oligonucleotide decoy
  source 1..44: mol_type = other DNA
aaaatggctccaccggtgtttatttacacgtgatgtaacacctg

SEQ ID NO: 1061 - DNA, 44 bp, synthetic construct
  misc_feature 1..44: note = oligonucleotide decoy
  source 1..44: mol_type = other DNA
aaaatggctccaccggtgtttgtttacacgtgacataacacctg

SEQ ID NO: 1062 - DNA, 44 bp, synthetic construct
  misc_feature 1..44: note = oligonucleotide decoy
  source 1..44: mol_type = other DNA
aaaatggctccaccggtgtttgtttacacgtgacgtaacacctg

SEQ ID NO: 1063 - DNA, 44 bp, synthetic construct
  misc_feature 1..44: note = oligonucleotide decoy
  source 1..44: mol_type = other DNA
aaaatggctccaccggtgtttgtttacacgtgatataacacctg

SEQ ID NO: 1064 - DNA, 44 bp, synthetic construct
  misc_feature 1..44: note = oligonucleotide decoy
  source 1..44: mol_type = other DNA
aaaatggctccaccggtgtttgtttacacgtgatgtaacacctg

SEQ ID NO: 1065 - DNA, 44 bp, synthetic construct
  misc_feature 1..44: note = oligonucleotide decoy
  source 1..44: mol_type = other DNA
aaaatggctccaccgttgtttatttacacgtgacataacacctg

SEQ ID NO: 1066 - DNA, 44 bp, synthetic construct
  misc_feature 1..44: note = oligonucleotide decoy
  source 1..44: mol_type = other DNA
aaaatggctccaccgttgtttatttacacgtgacgtaacacctg

SEQ ID NO: 1067 - DNA, 44 bp, synthetic construct
  misc_feature 1..44: note = oligonucleotide decoy
  source 1..44: mol_type = other DNA
aaaatggctccaccgttgtttatttacacgtgatataacacctg

SEQ ID NO: 1068 - DNA, 44 bp, synthetic construct
  misc_feature 1..44: note = oligonucleotide decoy
  source 1..44: mol_type = other DNA
aaaatggctccaccgttgtttatttacacgtgatgtaacacctg

SEQ ID NO: 1069 - DNA, 44 bp, synthetic construct
  misc_feature 1..44: note = oligonucleotide decoy
  source 1..44: mol_type = other DNA
aaaatggctccaccgttgtttgtttacacgtgacataacacctg

SEQ ID NO: 1070 - DNA, 44 bp, synthetic construct
  misc_feature 1..44: note = oligonucleotide decoy
  source 1..44: mol_type = other DNA
aaaatggctccaccgttgtttgtttacacgtgacgtaacacctg

SEQ ID NO: 1071 - DNA, 44 bp, synthetic construct
  misc_feature 1..44: note = oligonucleotide decoy
  source 1..44: mol_type = other DNA
aaaatggctccaccgttgtttgtttacacgtgatataacacctg

SEQ ID NO: 1072 - DNA, 44 bp, synthetic construct
  misc_feature 1..44: note = oligonucleotide decoy
  source 1..44: mol_type = other DNA
aaaatggctccaccgttgtttgtttacacgtgatgtaacacctg

SEQ ID NO: 1073 - DNA, 44 bp, synthetic construct
  misc_feature 1..44: note = oligonucleotide decoy
  source 1..44: mol_type = other DNA
aagatggctccatcgatgtttatttacacgtgttacatcacctg

SEQ ID NO: 1074 - DNA, 44 bp, synthetic construct
  misc_feature 1..44: note = oligonucleotide decoy
  source 1..44: mol_type = other DNA
aagatggctccatcgatgtttatttacacgtgttacgtcacctg

SEQ ID NO: 1075 - DNA, 44 bp, synthetic construct
  misc_feature 1..44: note = oligonucleotide decoy
  source 1..44: mol_type = other DNA
aagatggctccatcgatgtttatttacacgtgttatatcacctg

SEQ ID NO: 1076 - DNA, 44 bp, synthetic construct
  misc_feature 1..44: note = oligonucleotide decoy
  source 1..44: mol_type = other DNA
aagatggctccatcgatgtttatttacacgtgttatgtcacctg

SEQ ID NO: 1077 - DNA, 44 bp, synthetic construct
  misc_feature 1..44: note = oligonucleotide decoy
  source 1..44: mol_type = other DNA
aagatggctccatcgatgtttgtttacacgtgttacatcacctg

SEQ ID NO: 1078 - DNA, 44 bp, synthetic construct
  misc_feature 1..44: note = oligonucleotide decoy
  source 1..44: mol_type = other DNA
aagatggctccatcgatgtttgtttacacgtgttacgtcacctg

SEQ ID NO: 1079 - DNA, 44 bp, synthetic construct
  misc_feature 1..44: note = oligonucleotide decoy
  source 1..44: mol_type = other DNA
aagatggctccatcgatgtttgtttacacgtgttatatcacctg

SEQ ID NO: 1080 - DNA, 44 bp, synthetic construct
  misc_feature 1..44: note = oligonucleotide decoy
  source 1..44: mol_type = other DNA
aagatggctccatcgatgtttgtttacacgtgttatgtcacctg

SEQ ID NO: 1081 - DNA, 44 bp, synthetic construct
  misc_feature 1..44: note = oligonucleotide decoy
  source 1..44: mol_type = other DNA
aagatggctccatcgctgtttatttacacgtgttacatcacctg

SEQ ID NO: 1082 - DNA, 44 bp, synthetic construct
  misc_feature 1..44: note = oligonucleotide decoy
  source 1..44: mol_type = other DNA
aagatggctccatcgctgtttatttacacgtgttacgtcacctg

SEQ ID NO: 1083 - DNA, 44 bp, synthetic construct
  misc_feature 1..44: note = oligonucleotide decoy
  source 1..44: mol_type = other DNA
aagatggctccatcgctgtttatttacacgtgttatatcacctg

SEQ ID NO: 1084 - DNA, 44 bp, synthetic construct
  misc_feature 1..44: note = oligonucleotide decoy
  source 1..44: mol_type = other DNA
aagatggctccatcgctgtttatttacacgtgttatgtcacctg

SEQ ID NO: 1085 - DNA, 44 bp, synthetic construct
  misc_feature 1..44: note = oligonucleotide decoy
  source 1..44: mol_type = other DNA
aagatggctccatcgctgtttgtttacacgtgttacatcacctg

SEQ ID NO: 1086 - DNA, 44 bp, synthetic construct
  misc_feature 1..44: note = oligonucleotide decoy
  source 1..44: mol_type = other DNA
aagatggctccatcgctgtttgtttacacgtgttacgtcacctg

SEQ ID NO: 1087 - DNA, 44 bp, synthetic construct
  misc_feature 1..44: note = oligonucleotide decoy
  source 1..44: mol_type = other DNA
aagatggctccatcgctgtttgtttacacgtgttatatcacctg

SEQ ID NO: 1088 - DNA, 44 bp, synthetic construct
  misc_feature 1..44: note = oligonucleotide decoy
  source 1..44: mol_type = other DNA
aagatggctccatcgctgtttgtttacacgtgttatgtcacctg

SEQ ID NO: 1089 - DNA, 44 bp, synthetic construct
  misc_feature 1..44: note = oligonucleotide decoy
  source 1..44: mol_type = other DNA
aagatggctccatcggtgtttatttacacgtgttacatcacctg

SEQ ID NO: 1090 - DNA, 44 bp, synthetic construct
  misc_feature 1..44: note = oligonucleotide decoy
  source 1..44: mol_type = other DNA
aagatggctccatcggtgtttatttacacgtgttacgtcacctg

SEQ ID NO: 1091 - DNA, 44 bp, synthetic construct
  misc_feature 1..44: note = oligonucleotide decoy
  source 1..44: mol_type = other DNA
aagatggctccatcggtgtttatttacacgtgttatatcacctg

SEQ ID NO: 1092 - DNA, 44 bp, synthetic construct
  misc_feature 1..44: note = oligonucleotide decoy
  source 1..44: mol_type = other DNA
aagatggctccatcggtgtttatttacacgtgttatgtcacctg

SEQ ID NO: 1093 - DNA, 44 bp, synthetic construct
  misc_feature 1..44: note = oligonucleotide decoy
  source 1..44: mol_type = other DNA
aagatggctccatcggtgtttgtttacacgtgttacatcacctg

SEQ ID NO: 1094 - DNA, 44 bp, synthetic construct
  misc_feature 1..44: note = oligonucleotide decoy
  source 1..44: mol_type = other DNA
aagatggctccatcggtgtttgtttacacgtgttacgtcacctg

SEQ ID NO: 1095 - DNA, 44 bp, synthetic construct
  misc_feature 1..44: note = oligonucleotide decoy
  source 1..44: mol_type = other DNA
aagatggctccatcggtgtttgtttacacgtgttatatcacctg

SEQ ID NO: 1096 - DNA, 44 bp, synthetic construct
  misc_feature 1..44: note = oligonucleotide decoy
  source 1..44: mol_type = other DNA
aagatggctccatcggtgtttgtttacacgtgttatgtcacctg

SEQ ID NO: 1097 - DNA, 44 bp, synthetic construct
  misc_feature 1..44: note = oligonucleotide decoy
  source 1..44: mol_type = other DNA
aagatggctccatcgttgtttatttacacgtgttacatcacctg

SEQ ID NO: 1098 - DNA, 44 bp, synthetic construct
  misc_feature 1..44: note = oligonucleotide decoy
  source 1..44: mol_type = other DNA
aagatggctccatcgttgtttatttacacgtgttacgtcacctg

SEQ ID NO: 1099 - DNA, 44 bp, synthetic construct
  misc_feature 1..44: note = oligonucleotide decoy
  source 1..44: mol_type = other DNA
aagatggctccatcgttgtttatttacacgtgttatatcacctg

SEQ ID NO: 1100 - DNA, 44 bp, synthetic construct
  misc_feature 1..44: note = oligonucleotide decoy
  source 1..44: mol_type = other DNA
aagatggctccatcgttgtttatttacacgtgttatgtcacctg

SEQ ID NO: 1101 - DNA, 44 bp, synthetic construct
  misc_feature 1..44: note = oligonucleotide decoy
  source 1..44: mol_type = other DNA
aagatggctccatcgttgtttgtttacacgtgttacatcacctg

SEQ ID NO: 1102 - DNA, 44 bp, synthetic construct
  misc_feature 1..44: note = oligonucleotide decoy
  source 1..44: mol_type = other DNA
aagatggctccatcgttgtttgtttacacgtgttacgtcacctg

SEQ ID NO: 1103 - DNA, 44 bp, synthetic construct
  misc_feature 1..44: note = oligonucleotide decoy
  source 1..44: mol_type = other DNA
aagatggctccatcgttgtttgtttacacgtgttatatcacctg

SEQ ID NO: 1104 - DNA, 44 bp, synthetic construct
  misc_feature 1..44: note = oligonucleotide decoy
  source 1..44: mol_type = other DNA
aagatggctccatcgttgtttgtttacacgtgttatgtcacctg

SEQ ID NO: 1105 - DNA, 44 bp, synthetic construct
  misc_feature 1..44: note = oligonucleotide decoy
  source 1..44: mol_type = other DNA
aaaatggctccatcgatgtttatttacacgtgttacatcacctg

SEQ ID NO: 1106 - DNA, 44 bp, synthetic construct
  misc_feature 1..44: note = oligonucleotide decoy
  source 1..44: mol_type = other DNA
aaaatggctccatcgatgtttatttacacgtgttacgtcacctg

SEQ ID NO: 1107 - DNA, 44 bp, synthetic construct
  misc_feature 1..44: note = oligonucleotide decoy
  source 1..44: mol_type = other DNA
aaaatggctccatcgatgtttatttacacgtgttatatcacctg

SEQ ID NO: 1108 - DNA, 44 bp, synthetic construct
  misc_feature 1..44: note = oligonucleotide decoy
  source 1..44: mol_type = other DNA
aaaatggctccatcgatgtttatttacacgtgttatgtcacctg

SEQ ID NO: 1109 - DNA, 44 bp, synthetic construct
  misc_feature 1..44: note = oligonucleotide decoy
  source 1..44: mol_type = other DNA
aaaatggctccatcgatgtttgtttacacgtgttacatcacctg

SEQ ID NO: 1110 - DNA, 44 bp, synthetic construct
  misc_feature 1..44: note = oligonucleotide decoy
  source 1..44: mol_type = other DNA
aaaatggctccatcgatgtttgtttacacgtgttacgtcacctg

SEQ ID NO: 1111 - DNA, 44 bp, synthetic construct
  misc_feature 1..44: note = oligonucleotide decoy
  source 1..44: mol_type = other DNA
aaaatggctccatcgatgtttgtttacacgtgttatatcacctg

SEQ ID NO: 1112 - DNA, 44 bp, synthetic construct
  misc_feature 1..44: note = oligonucleotide decoy
  source 1..44: mol_type = other DNA
aaaatggctccatcgatgtttgtttacacgtgttatgtcacctg

SEQ ID NO: 1113 - DNA, 44 bp, synthetic construct
  misc_feature 1..44: note = oligonucleotide decoy
  source 1..44: mol_type = other DNA
aaaatggctccatcgctgtttatttacacgtgttacatcacctg

SEQ ID NO: 1114 - DNA, 44 bp, synthetic construct
  misc_feature 1..44: note = oligonucleotide decoy
  source 1..44: mol_type = other DNA
aaaatggctccatcgctgtttatttacacgtgttacgtcacctg

SEQ ID NO: 1115 - DNA, 44 bp, synthetic construct
  misc_feature 1..44: note = oligonucleotide decoy
  source 1..44: mol_type = other DNA
aaaatggctccatcgctgtttatttacacgtgttatatcacctg

SEQ ID NO: 1116 - DNA, 44 bp, synthetic construct
  misc_feature 1..44: note = oligonucleotide decoy
  source 1..44: mol_type = other DNA
aaaatggctccatcgctgtttatttacacgtgttatgtcacctg

SEQ ID NO: 1117 - DNA, 44 bp, synthetic construct
  misc_feature 1..44: note = oligonucleotide decoy
  source 1..44: mol_type = other DNA
aaaatggctccatcgctgtttgtttacacgtgttacatcacctg

SEQ ID NO: 1118 - DNA, 44 bp, synthetic construct
  misc_feature 1..44: note = oligonucleotide decoy
  source 1..44: mol_type = other DNA
aaaatggctccatcgctgtttgtttacacgtgttacgtcacctg

SEQ ID NO: 1119 - DNA, 44 bp, synthetic construct
  misc_feature 1..44: note = oligonucleotide decoy
  source 1..44: mol_type = other DNA
aaaatggctccatcgctgtttgtttacacgtgttatatcacctg

SEQ ID NO: 1120 - DNA, 44 bp, synthetic construct
  misc_feature 1..44: note = oligonucleotide decoy
  source 1..44: mol_type = other DNA
aaaatggctccatcgctgtttgtttacacgtgttatgtcacctg

SEQ ID NO: 1121 - DNA, 44 bp, synthetic construct
  misc_feature 1..44: note = oligonucleotide decoy
  source 1..44: mol_type = other DNA
aaaatggctccatcggtgtttatttacacgtgttacatcacctg

SEQ ID NO: 1122 - DNA, 44 bp, synthetic construct
  misc_feature 1..44: note = oligonucleotide decoy
  source 1..44: mol_type = other DNA
aaaatggctccatcggtgtttatttacacgtgttacgtcacctg

SEQ ID NO: 1123 - DNA, 44 bp, synthetic construct
  misc_feature 1..44: note = oligonucleotide decoy
  source 1..44: mol_type = other DNA
aaaatggctccatcggtgtttatttacacgtgttatatcacctg

SEQ ID NO: 1124 - DNA, 44 bp, synthetic construct
  misc_feature 1..44: note = oligonucleotide decoy
  source 1..44: mol_type = other DNA
aaaatggctccatcggtgtttatttacacgtgttatgtcacctg

SEQ ID NO: 1125 - DNA, 44 bp, synthetic construct
  misc_feature 1..44: note = oligonucleotide decoy
  source 1..44: mol_type = other DNA
aaaatggctccatcggtgtttgtttacacgtgttacatcacctg

SEQ ID NO: 1126 - DNA, 44 bp, synthetic construct
  misc_feature 1..44: note = oligonucleotide decoy
  source 1..44: mol_type = other DNA
aaaatggctccatcggtgtttgtttacacgtgttacgtcacctg

SEQ ID NO: 1127 - DNA, 44 bp, synthetic construct
  misc_feature 1..44: note = oligonucleotide decoy
  source 1..44: mol_type = other DNA
aaaatggctccatcggtgtttgtttacacgtgttatatcacctg

SEQ ID NO: 1128 - DNA, 44 bp, synthetic construct
  misc_feature 1..44: note = oligonucleotide decoy
  source 1..44: mol_type = other DNA
aaaatggctccatcggtgtttgtttacacgtgttatgtcacctg

SEQ ID NO: 1129 - DNA, 44 bp, synthetic construct
  misc_feature 1..44: note = oligonucleotide decoy
  source 1..44: mol_type = other DNA
aaaatggctccatcgttgtttatttacacgtgttacatcacctg

SEQ ID NO: 1130 - DNA, 44 bp, synthetic construct
  misc_feature 1..44: note = oligonucleotide decoy
  source 1..44: mol_type = other DNA
aaaatggctccatcgttgtttatttacacgtgttacgtcacctg

SEQ ID NO: 1131 - DNA, 44 bp, synthetic construct
  misc_feature 1..44: note = oligonucleotide decoy
  source 1..44: mol_type = other DNA
aaaatggctccatcgttgtttatttacacgtgttatatcacctg

SEQ ID NO: 1132 - DNA, 44 bp, synthetic construct
  misc_feature 1..44: note = oligonucleotide decoy
  source 1..44: mol_type = other DNA
aaaatggctccatcgttgtttatttacacgtgttatgtcacctg

SEQ ID NO: 1133 - DNA, 44 bp, synthetic construct
  misc_feature 1..44: note = oligonucleotide decoy
  source 1..44: mol_type = other DNA
aaaatggctccatcgttgtttgtttacacgtgttacatcacctg

SEQ ID NO: 1134 - DNA, 44 bp, synthetic construct
  misc_feature 1..44: note = oligonucleotide decoy
  source 1..44: mol_type = other DNA
aaaatggctccatcgttgtttgtttacacgtgttacgtcacctg

SEQ ID NO: 1135 - DNA, 44 bp, synthetic construct
  misc_feature 1..44: note = oligonucleotide decoy
  source 1..44: mol_type = other DNA
aaaatggctccatcgttgtttgtttacacgtgttatatcacctg

SEQ ID NO: 1136 - DNA, 44 bp, synthetic construct
  misc_feature 1..44: note = oligonucleotide decoy
  source 1..44: mol_type = other DNA
aaaatggctccatcgttgtttgtttacacgtgttatgtcacctg

SEQ ID NO: 1137 - DNA, 44 bp, synthetic construct
  misc_feature 1..44: note = oligonucleotide decoy
  source 1..44: mol_type = other DNA
aagatggctccaccgatgtttatttacacgtgttacatcacctg

SEQ ID NO: 1138 - DNA, 44 bp, synthetic construct
  misc_feature 1..44: note = oligonucleotide decoy
  source 1..44: mol_type = other DNA
aagatggctccaccgatgtttatttacacgtgttacgtcacctg

SEQ ID NO: 1139 - DNA, 44 bp, synthetic construct
  misc_feature 1..44: note = oligonucleotide decoy
  source 1..44: mol_type = other DNA
aagatggctccaccgatgtttatttacacgtgttatatcacctg

SEQ ID NO: 1140 - DNA, 44 bp, synthetic construct
  misc_feature 1..44: note = oligonucleotide decoy
  source 1..44: mol_type = other DNA
aagatggctccaccgatgtttatttacacgtgttatgtcacctg

SEQ ID NO: 1141 - DNA, 44 bp, synthetic construct
  misc_feature 1..44: note = oligonucleotide decoy
  source 1..44: mol_type = other DNA
aagatggctccaccgatgtttgtttacacgtgttacatcacctg

SEQ ID NO: 1142 - DNA, 44 bp, synthetic construct
  misc_feature 1..44: note = oligonucleotide decoy
  source 1..44: mol_type = other DNA
aagatggctccaccgatgtttgtttacacgtgttacgtcacctg

SEQ ID NO: 1143 - DNA, 44 bp, synthetic construct
  misc_feature 1..44: note = oligonucleotide decoy
  source 1..44: mol_type = other DNA
aagatggctccaccgatgtttgtttacacgtgttatatcacctg

SEQ ID NO: 1144 - DNA, 44 bp, synthetic construct
  misc_feature 1..44: note = oligonucleotide decoy
  source 1..44: mol_type = other DNA
aagatggctccaccgatgtttgtttacacgtgttatgtcacctg

SEQ ID NO: 1145 - DNA, 44 bp, synthetic construct
  misc_feature 1..44: note = oligonucleotide decoy
  source 1..44: mol_type = other DNA
aagatggctccaccgctgtttatttacacgtgttacatcacctg

SEQ ID NO: 1146 - DNA, 44 bp, synthetic construct
  misc_feature 1..44: note = oligonucleotide decoy
  source 1..44: mol_type = other DNA
aagatggctccaccgctgtttatttacacgtgttacgtcacctg

SEQ ID NO: 1147 - DNA, 44 bp, synthetic construct
  misc_feature 1..44: note = oligonucleotide decoy
  source 1..44: mol_type = other DNA
aagatggctccaccgctgtttatttacacgtgttatatcacctg

SEQ ID NO: 1148 - DNA, 44 bp, synthetic construct
  misc_feature 1..44: note = oligonucleotide decoy
  source 1..44: mol_type = other DNA
aagatggctccaccgctgtttatttacacgtgttatgtcacctg

SEQ ID NO: 1149 - DNA, 44 bp, synthetic construct
  misc_feature 1..44: note = oligonucleotide decoy
  source 1..44: mol_type = other DNA
aagatggctccaccgctgtttgtttacacgtgttacatcacctg

SEQ ID NO: 1150 - DNA, 44 bp, synthetic construct
  misc_feature 1..44: note = oligonucleotide decoy
  source 1..44: mol_type = other DNA
aagatggctccaccgctgtttgtttacacgtgttacgtcacctg

SEQ ID NO: 1151 - DNA, 44 bp, synthetic construct
  misc_feature 1..44: note = oligonucleotide decoy
  source 1..44: mol_type = other DNA
aagatggctccaccgctgtttgtttacacgtgttatatcacctg

SEQ ID NO: 1152 - DNA, 44 bp, synthetic construct
  misc_feature 1..44: note = oligonucleotide decoy
  source 1..44: mol_type = other DNA
aagatggctccaccgctgtttgtttacacgtgttatgtcacctg

SEQ ID NO: 1153 - DNA, 44 bp, synthetic construct
  misc_feature 1..44: note = oligonucleotide decoy
  source 1..44: mol_type = other DNA
aagatggctccaccggtgtttatttacacgtgttacatcacctg

SEQ ID NO: 1154 - DNA, 44 bp, synthetic construct
  misc_feature 1..44: note = oligonucleotide decoy
  source 1..44: mol_type = other DNA
aagatggctccaccggtgtttatttacacgtgttacgtcacctg

SEQ ID NO: 1155 - DNA, 44 bp, synthetic construct
  misc_feature 1..44: note = oligonucleotide decoy
  source 1..44: mol_type = other DNA
aagatggctccaccggtgtttatttacacgtgttatatcacctg

SEQ ID NO: 1156 - DNA, 44 bp, synthetic construct
  misc_feature 1..44: note = oligonucleotide decoy
  source 1..44: mol_type = other DNA
aagatggctccaccggtgtttatttacacgtgttatgtcacctg

SEQ ID NO: 1157 - DNA, 44 bp, synthetic construct
  misc_feature 1..44: note = oligonucleotide decoy
  source 1..44: mol_type = other DNA
aagatggctccaccggtgtttgtttacacgtgttacatcacctg

SEQ ID NO: 1158 - DNA, 44 bp, synthetic construct
  misc_feature 1..44: note = oligonucleotide decoy
  source 1..44: mol_type = other DNA
aagatggctccaccggtgtttgtttacacgtgttacgtcacctg

SEQ ID NO: 1159 - DNA, 44 bp, synthetic construct
  misc_feature 1..44: note = oligonucleotide decoy
  source 1..44: mol_type = other DNA
aagatggctccaccggtgtttgtttacacgtgttatatcacctg

SEQ ID NO: 1160 - DNA, 44 bp, synthetic construct
  misc_feature 1..44: note = oligonucleotide decoy
  source 1..44: mol_type = other DNA
aagatggctccaccggtgtttgtttacacgtgttatgtcacctg

SEQ ID NO: 1161 - DNA, 44 bp, synthetic construct
  misc_feature 1..44: note = oligonucleotide decoy
  source 1..44: mol_type = other DNA
aagatggctccaccgttgtttatttacacgtgttacatcacctg

SEQ ID NO: 1162 - DNA, 44 bp, synthetic construct
  misc_feature 1..44: note = oligonucleotide decoy
  source 1..44: mol_type = other DNA
aagatggctccaccgttgtttatttacacgtgttacgtcacctg

SEQ ID NO: 1163 - DNA, 44 bp, synthetic construct
  misc_feature 1..44: note = oligonucleotide decoy
  source 1..44: mol_type = other DNA
aagatggctccaccgttgtttatttacacgtgttatatcacctg

SEQ ID NO: 1164 - DNA, 44 bp, synthetic construct
  misc_feature 1..44: note = oligonucleotide decoy
  source 1..44: mol_type = other DNA
aagatggctccaccgttgtttatttacacgtgttatgtcacctg

SEQ ID NO: 1165 - DNA, 44 bp, synthetic construct
  misc_feature 1..44: note = oligonucleotide decoy
  source 1..44: mol_type = other DNA
aagatggctccaccgttgtttgtttacacgtgttacatcacctg

SEQ ID NO: 1166 - DNA, 44 bp, synthetic construct
  misc_feature 1..44: note = oligonucleotide decoy
  source 1..44: mol_type = other DNA
aagatggctccaccgttgtttgtttacacgtgttacgtcacctg

SEQ ID NO: 1167 - DNA, 44 bp, synthetic construct
  misc_feature 1..44: note = oligonucleotide decoy
  source 1..44: mol_type = other DNA
aagatggctccaccgttgtttgtttacacgtgttatatcacctg

SEQ ID NO: 1168 - DNA, 44 bp, synthetic construct
  misc_feature 1..44: note = oligonucleotide decoy
  source 1..44: mol_type = other DNA
aagatggctccaccgttgtttgtttacacgtgttatgtcacctg

SEQ ID NO: 1169 - DNA, 44 bp, synthetic construct
  misc_feature 1..44: note = oligonucleotide decoy
  source 1..44: mol_type = other DNA
aaaatggctccaccgatgtttatttacacgtgttacatcacctg

SEQ ID NO: 1170 - DNA, 44 bp, synthetic construct
  misc_feature 1..44: note = oligonucleotide decoy
  source 1..44: mol_type = other DNA
aaaatggctccaccgatgtttatttacacgtgttacgtcacctg

SEQ ID NO: 1171 - DNA, 44 bp, synthetic construct
  misc_feature 1..44: note = oligonucleotide decoy
  source 1..44: mol_type = other DNA
aaaatggctccaccgatgtttatttacacgtgttatatcacctg

SEQ ID NO: 1172 - DNA, 44 bp, synthetic construct
  misc_feature 1..44: note = oligonucleotide decoy
  source 1..44: mol_type = other DNA
aaaatggctccaccgatgtttatttacacgtgttatgtcacctg

SEQ ID NO: 1173 - DNA, 44 bp, synthetic construct
  misc_feature 1..44: note = oligonucleotide decoy
  source 1..44: mol_type = other DNA
aaaatggctccaccgatgtttgtttacacgtgttacatcacctg

SEQ ID NO: 1174 - DNA, 44 bp, synthetic construct
  misc_feature 1..44: note = oligonucleotide decoy
  source 1..44: mol_type = other DNA
aaaatggctccaccgatgtttgtttacacgtgttacgtcacctg

SEQ ID NO: 1175 - DNA, 44 bp, synthetic construct
  misc_feature 1..44: note = oligonucleotide decoy
  source 1..44: mol_type = other DNA
aaaatggctccaccgatgtttgtttacacgtgttatatcacctg

SEQ ID NO: 1176 - DNA, 44 bp, synthetic construct
  misc_feature 1..44: note = oligonucleotide decoy
  source 1..44: mol_type = other DNA
aaaatggctccaccgatgtttgtttacacgtgttatgtcacctg

SEQ ID NO: 1177 - DNA, 44 bp, synthetic construct
  misc_feature 1..44: note = oligonucleotide decoy
  source 1..44: mol_type = other DNA
aaaatggctccaccgctgtttatttacacgtgttacatcacctg

SEQ ID NO: 1178 - DNA, 44 bp, synthetic construct
  misc_feature 1..44: note = oligonucleotide decoy
  source 1..44: mol_type = other DNA
aaaatggctccaccgctgtttatttacacgtgttacgtcacctg

SEQ ID NO: 1179 - DNA, 44 bp, synthetic construct
  misc_feature 1..44: note = oligonucleotide decoy
  source 1..44: mol_type = other DNA
aaaatggctccaccgctgtttatttacacgtgttatatcacctg

SEQ ID NO: 1180 - DNA, 44 bp, synthetic construct
  misc_feature 1..44: note = oligonucleotide decoy
  source 1..44: mol_type = other DNA
aaaatggctccaccgctgtttatttacacgtgttatgtcacctg

SEQ ID NO: 1181 - DNA, 44 bp, synthetic construct
  misc_feature 1..44: note = oligonucleotide decoy
  source 1..44: mol_type = other DNA
aaaatggctccaccgctgtttgtttacacgtgttacatcacctg

SEQ ID NO: 1182 - DNA, 44 bp, synthetic construct
  misc_feature 1..44: note = oligonucleotide decoy
  source 1..44: mol_type = other DNA
aaaatggctccaccgctgtttgtttacacgtgttacgtcacctg

SEQ ID NO: 1183 - DNA, 44 bp, synthetic construct
  misc_feature 1..44: note = oligonucleotide decoy
  source 1..44: mol_type = other DNA
aaaatggctccaccgctgtttgtttacacgtgttatatcacctg

SEQ ID NO: 1184 - DNA, 44 bp, synthetic construct
  misc_feature 1..44: note = oligonucleotide decoy
  source 1..44: mol_type = other DNA
aaaatggctccaccgctgtttgtttacacgtgttatgtcacctg

SEQ ID NO: 1185 - DNA, 44 bp, synthetic construct
  misc_feature 1..44: note = oligonucleotide decoy
  source 1..44: mol_type = other DNA
aaaatggctccaccggtgtttatttacacgtgttacatcacctg

SEQ ID NO: 1186 - DNA, 44 bp, synthetic construct
  misc_feature 1..44: note = oligonucleotide decoy
  source 1..44: mol_type = other DNA
aaaatggctccaccggtgtttatttacacgtgttacgtcacctg

SEQ ID NO: 1187 - DNA, 44 bp, synthetic construct
  misc_feature 1..44: note = oligonucleotide decoy
  source 1..44: mol_type = other DNA
aaaatggctccaccggtgtttatttacacgtgttatatcacctg

SEQ ID NO: 1188 - DNA, 44 bp, synthetic construct
  misc_feature 1..44: note = oligonucleotide decoy
  source 1..44: mol_type = other DNA
aaaatggctccaccggtgtttatttacacgtgttatgtcacctg

SEQ ID NO: 1189 - DNA, 44 bp, synthetic construct
  misc_feature 1..44: note = oligonucleotide decoy
  source 1..44: mol_type = other DNA
aaaatggctccaccggtgtttgtttacacgtgttacatcacctg

SEQ ID NO: 1190 - DNA, 44 bp, synthetic construct
  misc_feature 1..44: note = oligonucleotide decoy
  source 1..44: mol_type = other DNA
aaaatggctccaccggtgtttgtttacacgtgttacgtcacctg

SEQ ID NO: 1191 - DNA, 44 bp, synthetic construct
  misc_feature 1..44: note = oligonucleotide decoy
  source 1..44: mol_type = other DNA
aaaatggctccaccggtgtttgtttacacgtgttatatcacctg

SEQ ID NO: 1192 - DNA, 44 bp, synthetic construct
  misc_feature 1..44: note = oligonucleotide decoy
  source 1..44: mol_type = other DNA
aaaatggctccaccggtgtttgtttacacgtgttatgtcacctg

SEQ ID NO: 1193 - DNA, 44 bp, synthetic construct
  misc_feature 1..44: note = oligonucleotide decoy
  source 1..44: mol_type = other DNA
aaaatggctccaccgttgtttatttacacgtgttacatcacctg

SEQ ID NO: 1194 - DNA, 44 bp, synthetic construct
  misc_feature 1..44: note = oligonucleotide decoy
  source 1..44: mol_type = other DNA
aaaatggctccaccgttgtttatttacacgtgttacgtcacctg

SEQ ID NO: 1195 - DNA, 44 bp, synthetic construct
  misc_feature 1..44: note = oligonucleotide decoy
  source 1..44: mol_type = other DNA
aaaatggctccaccgttgtttatttacacgtgttatatcacctg

SEQ ID NO: 1196 - DNA, 44 bp, synthetic construct
  misc_feature 1..44: note = oligonucleotide decoy
  source 1..44: mol_type = other DNA
aaaatggctccaccgttgtttatttacacgtgttatgtcacctg

SEQ ID NO: 1197 - DNA, 44 bp, synthetic construct
  misc_feature 1..44: note = oligonucleotide decoy
  source 1..44: mol_type = other DNA
aaaatggctccaccgttgtttgtttacacgtgttacatcacctg

SEQ ID NO: 1198 - DNA, 44 bp, synthetic construct
  misc_feature 1..44: note = oligonucleotide decoy
  source 1..44: mol_type = other DNA
aaaatggctccaccgttgtttgtttacacgtgttacgtcacctg

SEQ ID NO: 1199 - DNA, 44 bp, synthetic construct
  misc_feature 1..44: note = oligonucleotide decoy
  source 1..44: mol_type = other DNA
aaaatggctccaccgttgtttgtttacacgtgttatatcacctg

SEQ ID NO: 1200 - DNA, 44 bp, synthetic construct
  misc_feature 1..44: note = oligonucleotide decoy
  source 1..44: mol_type = other DNA
aaaatggctccaccgttgtttgtttacacgtgttatgtcacctg

SEQ ID NO: 1201 - DNA, 44 bp, synthetic construct
  misc_feature 1..44: note = oligonucleotide decoy
  source 1..44: mol_type = other DNA
aagatggctccatcgatgtttatttacacgtgacataacaggtg

SEQ ID NO: 1202 - DNA, 44 bp, synthetic construct
  misc_feature 1..44: note = oligonucleotide decoy
  source 1..44: mol_type = other DNA
aagatggctccatcgatgtttatttacacgtgacgtaacaggtg

SEQ ID NO: 1203 - DNA, 44 bp, synthetic construct
  misc_feature 1..44: note = oligonucleotide decoy
  source 1..44: mol_type = other DNA
aagatggctccatcgatgtttatttacacgtgatataacaggtg

SEQ ID NO: 1204 - DNA, 44 bp, synthetic construct
  misc_feature 1..44: note = oligonucleotide decoy
  source 1..44: mol_type = other DNA
aagatggctccatcgatgtttatttacacgtgatgtaacaggtg

SEQ ID NO: 1205 - DNA, 44 bp, synthetic construct
  misc_feature 1..44: note = oligonucleotide decoy
  source 1..44: mol_type = other DNA
aagatggctccatcgatgtttgtttacacgtgacataacaggtg

SEQ ID NO: 1206 - DNA, 44 bp, synthetic construct
  misc_feature 1..44: note = oligonucleotide decoy
  source 1..44: mol_type = other DNA
aagatggctccatcgatgtttgtttacacgtgacgtaacaggtg

SEQ ID NO: 1207 - DNA, 44 bp, synthetic construct
  misc_feature 1..44: note = oligonucleotide decoy
  source 1..44: mol_type = other DNA
aagatggctccatcgatgtttgtttacacgtgatataacaggtg

SEQ ID NO: 1208 - DNA, 44 bp, synthetic construct
  misc_feature 1..44: note = oligonucleotide decoy
  source 1..44: mol_type = other DNA
aagatggctccatcgatgtttgtttacacgtgatgtaacaggtg

SEQ ID NO: 1209 - DNA, 44 bp, synthetic construct
  misc_feature 1..44: note = oligonucleotide decoy
  source 1..44: mol_type = other DNA
aagatggctccatcgctgtttatttacacgtgacataacaggtg

SEQ ID NO: 1210 - DNA, 44 bp, synthetic construct
  misc_feature 1..44: note = oligonucleotide decoy
  source 1..44: mol_type = other DNA
aagatggctccatcgctgtttatttacacgtgacgtaacaggtg

SEQ ID NO: 1211 - DNA, 44 bp, synthetic construct
  misc_feature 1..44: note = oligonucleotide decoy
  source 1..44: mol_type = other DNA
aagatggctccatcgctgtttatttacacgtgatataacaggtg

SEQ ID NO: 1212 - DNA, 44 bp, synthetic construct
  misc_feature 1..44: note = oligonucleotide decoy
  source 1..44: mol_type = other DNA
aagatggctccatcgctgtttatttacacgtgatgtaacaggtg

SEQ ID NO: 1213 - DNA, 44 bp, synthetic construct
  misc_feature 1..44: note = oligonucleotide decoy
  source 1..44: mol_type = other DNA
aagatggctccatcgctgtttgtttacacgtgacataacaggtg

SEQ ID NO: 1214 - DNA, 44 bp, synthetic construct
  misc_feature 1..44: note = oligonucleotide decoy
  source 1..44: mol_type = other DNA
aagatggctccatcgctgtttgtttacacgtgacgtaacaggtg

SEQ ID NO: 1215 - DNA, 44 bp, synthetic construct
  misc_feature 1..44: note = oligonucleotide decoy
  source 1..44: mol_type = other DNA
aagatggctccatcgctgtttgtttacacgtgatataacaggtg

SEQ ID NO: 1216 - DNA, 44 bp, synthetic construct
  misc_feature 1..44: note = oligonucleotide decoy
  source 1..44: mol_type = other DNA
aagatggctccatcgctgtttgtttacacgtgatgtaacaggtg

SEQ ID NO: 1217 - DNA, 44 bp, synthetic construct
  misc_feature 1..44: note = oligonucleotide decoy
  source 1..44: mol_type = other DNA
aagatggctccatcggtgtttatttacacgtgacataacaggtg

SEQ ID NO: 1218 - DNA, 44 bp, synthetic construct
  misc_feature 1..44: note = oligonucleotide decoy
  source 1..44: mol_type = other DNA
aagatggctccatcggtgtttatttacacgtgacgtaacaggtg

SEQ ID NO: 1219 - DNA, 44 bp, synthetic construct
  misc_feature 1..44: note = oligonucleotide decoy
  source 1..44: mol_type = other DNA
aagatggctccatcggtgtttatttacacgtgatataacaggtg

SEQ ID NO: 1220 - DNA, 44 bp, synthetic construct
  misc_feature 1..44: note = oligonucleotide decoy
  source 1..44: mol_type = other DNA
aagatggctccatcggtgtttatttacacgtgatgtaacaggtg

SEQ ID NO: 1221 - DNA, 44 bp, synthetic construct
  misc_feature 1..44: note = oligonucleotide decoy
  source 1..44: mol_type = other DNA
aagatggctccatcggtgtttgtttacacgtgacataacaggtg

SEQ ID NO: 1222 - DNA, 44 bp, synthetic construct
  misc_feature 1..44: note = oligonucleotide decoy
  source 1..44: mol_type = other DNA
aagatggctccatcggtgtttgtttacacgtgacgtaacaggtg

SEQ ID NO: 1223 - DNA, 44 bp, synthetic construct
  misc_feature 1..44: note = oligonucleotide decoy
  source 1..44: mol_type = other DNA
aagatggctccatcggtgtttgtttacacgtgatataacaggtg

SEQ ID NO: 1224 - DNA, 44 bp, synthetic construct
  misc_feature 1..44: note = oligonucleotide decoy
  source 1..44: mol_type = other DNA
aagatggctccatcggtgtttgtttacacgtgatgtaacaggtg

SEQ ID NO: 1225 - DNA, 44 bp, synthetic construct
  misc_feature 1..44: note = oligonucleotide decoy
  source 1..44: mol_type = other DNA
aagatggctccatcgttgtttatttacacgtgacataacaggtg

SEQ ID NO: 1226 - DNA, 44 bp, synthetic construct
  misc_feature 1..44: note = oligonucleotide decoy
  source 1..44: mol_type = other DNA
aagatggctccatcgttgtttatttacacgtgacgtaacaggtg

SEQ ID NO: 1227 - DNA, 44 bp, synthetic construct
  misc_feature 1..44: note = oligonucleotide decoy
  source 1..44: mol_type = other DNA
aagatggctccatcgttgtttatttacacgtgatataacaggtg

SEQ ID NO: 1228 - DNA, 44 bp, synthetic construct
  misc_feature 1..44: note = oligonucleotide decoy
  source 1..44: mol_type = other DNA
aagatggctccatcgttgtttatttacacgtgatgtaacaggtg

SEQ ID NO: 1229 - DNA, 44 bp, synthetic construct
  misc_feature 1..44: note = oligonucleotide decoy
  source 1..44: mol_type = other DNA
aagatggctccatcgttgtttgtttacacgtgacataacaggtg

SEQ ID NO: 1230 - DNA, 44 bp, synthetic construct
  misc_feature 1..44: note = oligonucleotide decoy
  source 1..44: mol_type = other DNA
aagatggctccatcgttgtttgtttacacgtgacgtaacaggtg

SEQ ID NO: 1231 - DNA, 44 bp, synthetic construct
  misc_feature 1..44: note = oligonucleotide decoy
  source 1..44: mol_type = other DNA
aagatggctccatcgttgtttgtttacacgtgatataacaggtg

SEQ ID NO: 1232 - DNA, 44 bp, synthetic construct
  misc_feature 1..44: note = oligonucleotide decoy
  source 1..44: mol_type = other DNA
aagatggctccatcgttgtttgtttacacgtgatgtaacaggtg

SEQ ID NO: 1233 - DNA, 44 bp, synthetic construct
  misc_feature 1..44: note = oligonucleotide decoy
  source 1..44: mol_type = other DNA
aaaatggctccatcgatgtttatttacacgtgacataacaggtg

SEQ ID NO: 1234 - DNA, 44 bp, synthetic construct
  misc_feature 1..44: note = oligonucleotide decoy
  source 1..44: mol_type = other DNA
aaaatggctccatcgatgtttatttacacgtgacgtaacaggtg

SEQ ID NO: 1235 - DNA, 44 bp, synthetic construct
  misc_feature 1..44: note = oligonucleotide decoy
  source 1..44: mol_type = other DNA
aaaatggctccatcgatgtttatttacacgtgatataacaggtg

SEQ ID NO: 1236 - DNA, 44 bp, synthetic construct
  misc_feature 1..44: note = oligonucleotide decoy
  source 1..44: mol_type = other DNA
aaaatggctccatcgatgtttatttacacgtgatgtaacaggtg

SEQ ID NO: 1237 - DNA, 44 bp, synthetic construct
  misc_feature 1..44: note = oligonucleotide decoy
  source 1..44: mol_type = other DNA
aaaatggctccatcgatgtttgtttacacgtgacataacaggtg

SEQ ID NO: 1238 - DNA, 44 bp, synthetic construct
  misc_feature 1..44: note = oligonucleotide decoy
  source 1..44: mol_type = other DNA
aaaatggctccatcgatgtttgtttacacgtgacgtaacaggtg

SEQ ID NO: 1239 - DNA, 44 bp, synthetic construct
  misc_feature 1..44: note = oligonucleotide decoy
  source 1..44: mol_type = other DNA
aaaatggctccatcgatgtttgtttacacgtgatataacaggtg

SEQ ID NO: 1240 - DNA, 44 bp, synthetic construct
  misc_feature 1..44: note = oligonucleotide decoy
  source 1..44: mol_type = other DNA
aaaatggctccatcgatgtttgtttacacgtgatgtaacaggtg

SEQ ID NO: 1241 - DNA, 44 bp, synthetic construct
  misc_feature 1..44: note = oligonucleotide decoy
  source 1..44: mol_type = other DNA
aaaatggctccatcgctgtttatttacacgtgacataacaggtg

SEQ ID NO: 1242 - DNA, 44 bp, synthetic construct
  misc_feature 1..44: note = oligonucleotide decoy
  source 1..44: mol_type = other DNA
aaaatggctccatcgctgtttatttacacgtgacgtaacaggtg

SEQ ID NO: 1243 - DNA, 44 bp, synthetic construct
  misc_feature 1..44: note = oligonucleotide decoy
  source 1..44: mol_type = other DNA
aaaatggctccatcgctgtttatttacacgtgatataacaggtg

SEQ ID NO: 1244 - DNA, 44 bp, synthetic construct
  misc_feature 1..44: note = oligonucleotide decoy
  source 1..44: mol_type = other DNA
aaaatggctccatcgctgtttatttacacgtgatgtaacaggtg

SEQ ID NO: 1245 - DNA, 44 bp, synthetic construct
  misc_feature 1..44: note = oligonucleotide decoy
  source 1..44: mol_type = other DNA
aaaatggctccatcgctgtttgtttacacgtgacataacaggtg

SEQ ID NO: 1246 - DNA, 44 bp, synthetic construct
  misc_feature 1..44: note = oligonucleotide decoy
  source 1..44: mol_type = other DNA
aaaatggctccatcgctgtttgtttacacgtgacgtaacaggtg

SEQ ID NO: 1247 - DNA, 44 bp, synthetic construct
  misc_feature 1..44: note = oligonucleotide decoy
  source 1..44: mol_type = other DNA
aaaatggctccatcgctgtttgtttacacgtgatataacaggtg

SEQ ID NO: 1248 - DNA, 44 bp, synthetic construct
  misc_feature 1..44: note = oligonucleotide decoy
  source 1..44: mol_type = other DNA
aaaatggctccatcgctgtttgtttacacgtgatgtaacaggtg

SEQ ID NO: 1249 - DNA, 44 bp, synthetic construct
  misc_feature 1..44: note = oligonucleotide decoy
  source 1..44: mol_type = other DNA
aaaatggctccatcggtgtttatttacacgtgacataacaggtg

SEQ ID NO: 1250 - DNA, 44 bp, synthetic construct
  misc_feature 1..44: note = oligonucleotide decoy
  source 1..44: mol_type = other DNA
aaaatggctccatcggtgtttatttacacgtgacgtaacaggtg

SEQ ID NO: 1251 - DNA, 44 bp, synthetic construct
  misc_feature 1..44: note = oligonucleotide decoy
  source 1..44: mol_type = other DNA
aaaatggctccatcggtgtttatttacacgtgatataacaggtg

SEQ ID NO: 1252 - DNA, 44 bp, synthetic construct
  misc_feature 1..44: note = oligonucleotide decoy
  source 1..44: mol_type = other DNA
aaaatggctccatcggtgtttatttacacgtgatgtaacaggtg

SEQ ID NO: 1253 - DNA, 44 bp, synthetic construct
  misc_feature 1..44: note = oligonucleotide decoy
  source 1..44: mol_type = other DNA
aaaatggctccatcggtgtttgtttacacgtgacataacaggtg

SEQ ID NO: 1254 - DNA, 44 bp, synthetic construct
  misc_feature 1..44: note = oligonucleotide decoy
  source 1..44: mol_type = other DNA
aaaatggctccatcggtgtttgtttacacgtgacgtaacaggtg

SEQ ID NO: 1255 - DNA, 44 bp, synthetic construct
  misc_feature 1..44: note = oligonucleotide decoy
  source 1..44: mol_type = other DNA
aaaatggctccatcggtgtttgtttacacgtgatataacaggtg

SEQ ID NO: 1256 - DNA, 44 bp, synthetic construct
  misc_feature 1..44: note = oligonucleotide decoy
  source 1..44: mol_type = other DNA
aaaatggctccatcggtgtttgtttacacgtgatgtaacaggtg

SEQ ID NO: 1257 - DNA, 44 bp, synthetic construct
  misc_feature 1..44: note = oligonucleotide decoy
  source 1..44: mol_type = other DNA
aaaatggctccatcgttgtttatttacacgtgacataacaggtg

SEQ ID NO: 1258 - DNA, 44 bp, synthetic construct
  misc_feature 1..44: note = oligonucleotide decoy
  source 1..44: mol_type = other DNA
aaaatggctccatcgttgtttatttacacgtgacgtaacaggtg

SEQ ID NO: 1259 - DNA, 44 bp, synthetic construct
  misc_feature 1..44: note = oligonucleotide decoy
  source 1..44: mol_type = other DNA
aaaatggctccatcgttgtttatttacacgtgatataacaggtg

SEQ ID NO: 1260 - DNA, 44 bp, synthetic construct
  misc_feature 1..44: note = oligonucleotide decoy
  source 1..44: mol_type = other DNA
aaaatggctccatcgttgtttatttacacgtgatgtaacaggtg

SEQ ID NO: 1261 - DNA, 44 bp, synthetic construct
  misc_feature 1..44: note = oligonucleotide decoy
  source 1..44: mol_type = other DNA
aaaatggctccatcgttgtttgtttacacgtgacataacaggtg

SEQ ID NO: 1262 - DNA, 44 bp, synthetic construct
  misc_feature 1..44: note = oligonucleotide decoy
  source 1..44: mol_type = other DNA
aaaatggctccatcgttgtttgtttacacgtgacgtaacaggtg

SEQ ID NO: 1263 - DNA, 44 bp, synthetic construct
  misc_feature 1..44: note = oligonucleotide decoy
  source 1..44: mol_type = other DNA
aaaatggctccatcgttgtttgtttacacgtgatataacaggtg

SEQ ID NO: 1264 - DNA, 44 bp, synthetic construct
  misc_feature 1..44: note = oligonucleotide decoy
  source 1..44: mol_type = other DNA
aaaatggctccatcgttgtttgtttacacgtgatgtaacaggtg

SEQ ID NO: 1265 - DNA, 44 bp, synthetic construct
  misc_feature 1..44: note = oligonucleotide decoy
  source 1..44: mol_type = other DNA
aagatggctccaccgatgtttatttacacgtgacataacaggtg

SEQ ID NO: 1266 - DNA, 44 bp, synthetic construct
  misc_feature 1..44: note = oligonucleotide decoy
  source 1..44: mol_type = other DNA
aagatggctccaccgatgtttatttacacgtgacgtaacaggtg

SEQ ID NO: 1267 - DNA, 44 bp, synthetic construct
  misc_feature 1..44: note = oligonucleotide decoy
  source 1..44: mol_type = other DNA
aagatggctccaccgatgtttatttacacgtgatataacaggtg

SEQ ID NO: 1268 - DNA, 44 bp, synthetic construct
  misc_feature 1..44: note = oligonucleotide decoy
  source 1..44: mol_type = other DNA
aagatggctccaccgatgtttatttacacgtgatgtaacaggtg

SEQ ID NO: 1269 - DNA, 44 bp, synthetic construct
  misc_feature 1..44: note = oligonucleotide decoy
  source 1..44: mol_type = other DNA
aagatggctccaccgatgtttgtttacacgtgacataacaggtg

SEQ ID NO: 1270 - DNA, 44 bp, synthetic construct
  misc_feature 1..44: note = oligonucleotide decoy
  source 1..44: mol_type = other DNA
aagatggctccaccgatgtttgtttacacgtgacgtaacaggtg

SEQ ID NO: 1271 - DNA, 44 bp, synthetic construct
  misc_feature 1..44: note = oligonucleotide decoy
  source 1..44: mol_type = other DNA
aagatggctccaccgatgtttgtttacacgtgatataacaggtg

SEQ ID NO: 1272 - DNA, 44 bp, synthetic construct
  misc_feature 1..44: note = oligonucleotide decoy
  source 1..44: mol_type = other DNA
aagatggctccaccgatgtttgtttacacgtgatgtaacaggtg

SEQ ID NO: 1273 - DNA, 44 bp, synthetic construct
  misc_feature 1..44: note = oligonucleotide decoy
  source 1..44: mol_type = other DNA
aagatggctccaccgctgtttatttacacgtgacataacaggtg

SEQ ID NO: 1274 - DNA, 44 bp, synthetic construct
  misc_feature 1..44: note = oligonucleotide decoy
  source 1..44: mol_type = other DNA
aagatggctccaccgctgtttatttacacgtgacgtaacaggtg

SEQ ID NO: 1275 - DNA, 44 bp, synthetic construct
  misc_feature 1..44: note = oligonucleotide decoy
  source 1..44: mol_type = other DNA
aagatggctccaccgctgtttatttacacgtgatataacaggtg

SEQ ID NO: 1276 - DNA, 44 bp, synthetic construct
  misc_feature 1..44: note = oligonucleotide decoy
  source 1..44: mol_type = other DNA
aagatggctccaccgctgtttatttacacgtgatgtaacaggtg

SEQ ID NO: 1277 - DNA, 44 bp, synthetic construct
  misc_feature 1..44: note = oligonucleotide decoy
  source 1..44: mol_type = other DNA
aagatggctccaccgctgtttgtttacacgtgacataacaggtg

SEQ ID NO: 1278 - DNA, 44 bp, synthetic construct
  misc_feature 1..44: note = oligonucleotide decoy
  source 1..44: mol_type = other DNA
aagatggctccaccgctgtttgtttacacgtgacgtaacaggtg

SEQ ID NO: 1279 - DNA, 44 bp, synthetic construct
  misc_feature 1..44: note = oligonucleotide decoy
  source 1..44: mol_type = other DNA
aagatggctccaccgctgtttgtttacacgtgatataacaggtg

SEQ ID NO: 1280 - DNA, 44 bp, synthetic construct
  misc_feature 1..44: note = oligonucleotide decoy
  source 1..44: mol_type = other DNA
aagatggctccaccgctgtttgtttacacgtgatgtaacaggtg

SEQ ID NO: 1281 - DNA, 44 bp, synthetic construct
  misc_feature 1..44: note = oligonucleotide decoy
  source 1..44: mol_type = other DNA
aagatggctccaccggtgtttatttacacgtgacataacaggtg

SEQ ID NO: 1282 - DNA, 44 bp, synthetic construct
  misc_feature 1..44: note = oligonucleotide decoy
  source 1..44: mol_type = other DNA
aagatggctccaccggtgtttatttacacgtgacgtaacaggtg

SEQ ID NO: 1283 - DNA, 44 bp, synthetic construct
  misc_feature 1..44: note = oligonucleotide decoy
  source 1..44: mol_type = other DNA
aagatggctccaccggtgtttatttacacgtgatataacaggtg

SEQ ID NO: 1284 - DNA, 44 bp, synthetic construct
  misc_feature 1..44: note = oligonucleotide decoy
  source 1..44: mol_type = other DNA
aagatggctccaccggtgtttatttacacgtgatgtaacaggtg

SEQ ID NO: 1285 - DNA, 44 bp, synthetic construct
  misc_feature 1..44: note = oligonucleotide decoy
  source 1..44: mol_type = other DNA
aagatggctccaccggtgtttgtttacacgtgacataacaggtg

SEQ ID NO: 1286 - DNA, 44 bp, synthetic construct
  misc_feature 1..44: note = oligonucleotide decoy
  source 1..44: mol_type = other DNA
aagatggctccaccggtgtttgtttacacgtgacgtaacaggtg

SEQ ID NO: 1287 - DNA, 44 bp, synthetic construct
  misc_feature 1..44: note = oligonucleotide decoy
  source 1..44: mol_type = other DNA
aagatggctccaccggtgtttgtttacacgtgatataacaggtg

SEQ ID NO: 1288 - DNA, 44 bp, synthetic construct
  misc_feature 1..44: note = oligonucleotide decoy
  source 1..44: mol_type = other DNA
aagatggctccaccggtgtttgtttacacgtgatgtaacaggtg

SEQ ID NO: 1289 - DNA, 44 bp, synthetic construct
  misc_feature 1..44: note = oligonucleotide decoy
  source 1..44: mol_type = other DNA
aagatggctccaccgttgtttatttacacgtgacataacaggtg

SEQ ID NO: 1290 - DNA, 44 bp, synthetic construct
  misc_feature 1..44: note = oligonucleotide decoy
  source 1..44: mol_type = other DNA
aagatggctccaccgttgtttatttacacgtgacgtaacaggtg

SEQ ID NO: 1291 - DNA, 44 bp, synthetic construct
  misc_feature 1..44: note = oligonucleotide decoy
  source 1..44: mol_type = other DNA
aagatggctccaccgttgtttatttacacgtgatataacaggtg

SEQ ID NO: 1292 - DNA, 44 bp, synthetic construct
  misc_feature 1..44: note = oligonucleotide decoy
  source 1..44: mol_type = other DNA
aagatggctccaccgttgtttatttacacgtgatgtaacaggtg

SEQ ID NO: 1293 - DNA, 44 bp, synthetic construct
  misc_feature 1..44: note = oligonucleotide decoy
  source 1..44: mol_type = other DNA
aagatggctccaccgttgtttgtttacacgtgacataacaggtg

SEQ ID NO: 1294 - DNA, 44 bp, synthetic construct
  misc_feature 1..44: note = oligonucleotide decoy
  source 1..44: mol_type = other DNA
aagatggctccaccgttgtttgtttacacgtgacgtaacaggtg

SEQ ID NO: 1295 - DNA, 44 bp, synthetic construct
  misc_feature 1..44: note = oligonucleotide decoy
  source 1..44: mol_type = other DNA
aagatggctccaccgttgtttgtttacacgtgatataacaggtg

SEQ ID NO: 1296 - DNA, 44 bp, synthetic construct
  misc_feature 1..44: note = oligonucleotide decoy
  source 1..44: mol_type = other DNA
aagatggctccaccgttgtttgtttacacgtgatgtaacaggtg

SEQ ID NO: 1297 - DNA, 44 bp, synthetic construct
  misc_feature 1..44: note = oligonucleotide decoy
  source 1..44: mol_type = other DNA
aaaatggctccaccgatgtttatttacacgtgacataacaggtg

SEQ ID NO: 1298 - DNA, 44 bp, synthetic construct
  misc_feature 1..44: note = oligonucleotide decoy
  source 1..44: mol_type = other DNA
aaaatggctccaccgatgtttatttacacgtgacgtaacaggtg

SEQ ID NO: 1299 - DNA, 44 bp, synthetic construct
  misc_feature 1..44: note = oligonucleotide decoy
  source 1..44: mol_type = other DNA
aaaatggctccaccgatgtttatttacacgtgatataacaggtg

SEQ ID NO: 1300 - DNA, 44 bp, synthetic construct
  misc_feature 1..44: note = oligonucleotide decoy
  source 1..44: mol_type = other DNA
aaaatggctccaccgatgtttatttacacgtgatgtaacaggtg

SEQ ID NO: 1301 - DNA, 44 bp, synthetic construct
  misc_feature 1..44: note = oligonucleotide decoy
  source 1..44: mol_type = other DNA
aaaatggctccaccgatgtttgtttacacgtgacataacaggtg

SEQ ID NO: 1302 - DNA, 44 bp, synthetic construct
  misc_feature 1..44: note = oligonucleotide decoy
  source 1..44: mol_type = other DNA
aaaatggctccaccgatgtttgtttacacgtgacgtaacaggtg

SEQ ID NO: 1303 - DNA, 44 bp, synthetic construct
  misc_feature 1..44: note = oligonucleotide decoy
  source 1..44: mol_type = other DNA
aaaatggctccaccgatgtttgtttacacgtgatataacaggtg

SEQ ID NO: 1304 - DNA, 44 bp, synthetic construct
  misc_feature 1..44: note = oligonucleotide decoy
  source 1..44: mol_type = other DNA
aaaatggctccaccgatgtttgtttacacgtgatgtaacaggtg

SEQ ID NO: 1305 - DNA, 44 bp, synthetic construct
  misc_feature 1..44: note = oligonucleotide decoy
  source 1..44: mol_type = other DNA
aaaatggctccaccgctgtttatttacacgtgacataacaggtg

SEQ ID NO: 1306 - DNA, 44 bp, synthetic construct
  misc_feature 1..44: note = oligonucleotide decoy
  source 1..44: mol_type = other DNA
aaaatggctccaccgctgtttatttacacgtgacgtaacaggtg

SEQ ID NO: 1307 - DNA, 44 bp, synthetic construct
  misc_feature 1..44: note = oligonucleotide decoy
  source 1..44: mol_type = other DNA
aaaatggctccaccgctgtttatttacacgtgatataacaggtg

SEQ ID NO: 1308 - DNA, 44 bp, synthetic construct
  misc_feature 1..44: note = oligonucleotide decoy
  source 1..44: mol_type = other DNA
aaaatggctccaccgctgtttatttacacgtgatgtaacaggtg

SEQ ID NO: 1309 - DNA, 44 bp, synthetic construct
  misc_feature 1..44: note = oligonucleotide decoy
  source 1..44: mol_type = other DNA
aaaatggctccaccgctgtttgtttacacgtgacataacaggtg

SEQ ID NO: 1310 - DNA, 44 bp, synthetic construct
  misc_feature 1..44: note = oligonucleotide decoy
  source 1..44: mol_type = other DNA
aaaatggctccaccgctgtttgtttacacgtgacgtaacaggtg

SEQ ID NO: 1311 - DNA, 44 bp, synthetic construct
  misc_feature 1..44: note = oligonucleotide decoy
  source 1..44: mol_type = other DNA
aaaatggctccaccgctgtttgtttacacgtgatataacaggtg

SEQ ID NO: 1312 - DNA, 44 bp, synthetic construct
  misc_feature 1..44: note = oligonucleotide decoy
  source 1..44: mol_type = other DNA
aaaatggctccaccgctgtttgtttacacgtgatgtaacaggtg

SEQ ID NO: 1313 - DNA, 44 bp, synthetic construct
  misc_feature 1..44: note = oligonucleotide decoy
  source 1..44: mol_type = other DNA
aaaatggctccaccggtgtttatttacacgtgacataacaggtg

SEQ ID NO: 1314 - DNA, 44 bp, synthetic construct
  misc_feature 1..44: note = oligonucleotide decoy
  source 1..44: mol_type = other DNA
aaaatggctccaccggtgtttatttacacgtgacgtaacaggtg

SEQ ID NO: 1315 - DNA, 44 bp, synthetic construct
  misc_feature 1..44: note = oligonucleotide decoy
  source 1..44: mol_type = other DNA
aaaatggctccaccggtgtttatttacacgtgatataacaggtg

SEQ ID NO: 1316 - DNA, 44 bp, synthetic construct
  misc_feature 1..44: note = oligonucleotide decoy
  source 1..44: mol_type = other DNA
aaaatggctccaccggtgtttatttacacgtgatgtaacaggtg

SEQ ID NO: 1317 - DNA, 44 bp, synthetic construct
  misc_feature 1..44: note = oligonucleotide decoy
  source 1..44: mol_type = other DNA
aaaatggctccaccggtgtttgtttacacgtgacataacaggtg

SEQ ID NO: 1318 - DNA, 44 bp, synthetic construct
  misc_feature 1..44: note = oligonucleotide decoy
  source 1..44: mol_type = other DNA
aaaatggctccaccggtgtttgtttacacgtgacgtaacaggtg

SEQ ID NO: 1319 - DNA, 44 bp, synthetic construct
  misc_feature 1..44: note = oligonucleotide decoy
  source 1..44: mol_type = other DNA
aaaatggctccaccggtgtttgtttacacgtgatataacaggtg

SEQ ID NO: 1320 - DNA, 44 bp, synthetic construct
  misc_feature 1..44: note = oligonucleotide decoy
  source 1..44: mol_type = other DNA
aaaatggctccaccggtgtttgtttacacgtgatgtaacaggtg

SEQ ID NO: 1321 - DNA, 44 bp, synthetic construct
  misc_feature 1..44: note = oligonucleotide decoy
  source 1..44: mol_type = other DNA
aaaatggctccaccgttgtttatttacacgtgacataacaggtg

SEQ ID NO: 1322 - DNA, 44 bp, synthetic construct
  misc_feature 1..44: note = oligonucleotide decoy
  source 1..44: mol_type = other DNA
aaaatggctccaccgttgtttatttacacgtgacgtaacaggtg

SEQ ID NO: 1323 - DNA, 44 bp, synthetic construct
  misc_feature 1..44: note = oligonucleotide decoy
  source 1..44: mol_type = other DNA
aaaatggctccaccgttgtttatttacacgtgatataacaggtg

SEQ ID NO: 1324 - DNA, 44 bp, synthetic construct
  misc_feature 1..44: note = oligonucleotide decoy
  source 1..44: mol_type = other DNA
aaaatggctccaccgttgtttatttacacgtgatgtaacaggtg

SEQ ID NO: 1325 - DNA, 44 bp, synthetic construct
  misc_feature 1..44: note = oligonucleotide decoy
  source 1..44: mol_type = other DNA
aaaatggctccaccgttgtttgtttacacgtgacataacaggtg

SEQ ID NO: 1326 - DNA, 44 bp, synthetic construct
  misc_feature 1..44: note = oligonucleotide decoy
  source 1..44: mol_type = other DNA
aaaatggctccaccgttgtttgtttacacgtgacgtaacaggtg

SEQ ID NO: 1327 - DNA, 44 bp, synthetic construct
  misc_feature 1..44: note = oligonucleotide decoy
  source 1..44: mol_type = other DNA
aaaatggctccaccgttgtttgtttacacgtgatataacaggtg

SEQ ID NO: 1328 - DNA, 44 bp, synthetic construct
  misc_feature 1..44: note = oligonucleotide decoy
  source 1..44: mol_type = other DNA
aaaatggctccaccgttgtttgtttacacgtgatgtaacaggtg

SEQ ID NO: 1329 - DNA, 44 bp, synthetic construct
  misc_feature 1..44: note = oligonucleotide decoy
  source 1..44: mol_type = other DNA
aagatggctccatcgatgacataacacctgtttatttacacgtg

SEQ ID NO: 1330 - DNA, 44 bp, synthetic construct
  misc_feature 1..44: note = oligonucleotide decoy
  source 1..44: mol_type = other DNA
aagatggctccatcgatgacataacacctgtttgtttacacgtg

SEQ ID NO: 1331 - DNA, 44 bp, synthetic construct
  misc_feature 1..44: note = oligonucleotide decoy
  source 1..44: mol_type = other DNA
aagatggctccatcgatgacgtaacacctgtttatttacacgtg

SEQ ID NO: 1332 - DNA, 44 bp, synthetic construct
  misc_feature 1..44: note = oligonucleotide decoy
  source 1..44: mol_type = other DNA
aagatggctccatcgatgacgtaacacctgtttgtttacacgtg

SEQ ID NO: 1333 - DNA, 44 bp, synthetic construct
  misc_feature 1..44: note = oligonucleotide decoy
  source 1..44: mol_type = other DNA
aagatggctccatcgatgatataacacctgtttatttacacgtg

SEQ ID NO: 1334 - DNA, 44 bp, synthetic construct
  misc_feature 1..44: note = oligonucleotide decoy
  source 1..44: mol_type = other DNA
aagatggctccatcgatgatataacacctgtttgtttacacgtg

SEQ ID NO: 1335 - DNA, 44 bp, synthetic construct
  misc_feature 1..44: note = oligonucleotide decoy
  source 1..44: mol_type = other DNA
aagatggctccatcgatgatgtaacacctgtttatttacacgtg

SEQ ID NO: 1336 - DNA, 44 bp, synthetic construct
  misc_feature 1..44: note = oligonucleotide decoy
  source 1..44: mol_type = other DNA
aagatggctccatcgatgatgtaacacctgtttgtttacacgtg

SEQ ID NO: 1337 - DNA, 44 bp, synthetic construct
  misc_feature 1..44: note = oligonucleotide decoy
  source 1..44: mol_type = other DNA
aagatggctccatcggtgacataacacctgtttatttacacgtg

SEQ ID NO: 1338 - DNA, 44 bp, synthetic construct
  misc_feature 1..44: note = oligonucleotide decoy
  source 1..44: mol_type = other DNA
aagatggctccatcggtgacataacacctgtttgtttacacgtg

SEQ ID NO: 1339 - DNA, 44 bp, synthetic construct
  misc_feature 1..44: note = oligonucleotide decoy
  source 1..44: mol_type = other DNA
aagatggctccatcggtgacgtaacacctgtttatttacacgtg

SEQ ID NO: 1340 - DNA, 44 bp, synthetic construct
  misc_feature 1..44: note = oligonucleotide decoy
  source 1..44: mol_type = other DNA
aagatggctccatcggtgacgtaacacctgtttgtttacacgtg

SEQ ID NO: 1341 - DNA, 44 bp, synthetic construct
  misc_feature 1..44: note = oligonucleotide decoy
  source 1..44: mol_type = other DNA
aagatggctccatcggtgatataacacctgtttatttacacgtg

SEQ ID NO: 1342 - DNA, 44 bp, synthetic construct
  misc_feature 1..44: note = oligonucleotide decoy
  source 1..44: mol_type = other DNA
aagatggctccatcggtgatataacacctgtttgtttacacgtg

SEQ ID NO: 1343 - DNA, 44 bp, synthetic construct
  misc_feature 1..44: note = oligonucleotide decoy
  source 1..44: mol_type = other DNA
aagatggctccatcggtgatgtaacacctgtttatttacacgtg

SEQ ID NO: 1344 - DNA, 44 bp, synthetic construct
  misc_feature 1..44: note = oligonucleotide decoy
  source 1..44: mol_type = other DNA
aagatggctccatcggtgatgtaacacctgtttgtttacacgtg

SEQ ID NO: 1345 - DNA, 44 bp, synthetic construct
  misc_feature 1..44: note = oligonucleotide decoy
  source 1..44: mol_type = other DNA
aaaatggctccatcgatgacataacacctgtttatttacacgtg

SEQ ID NO: 1346 - DNA, 44 bp, synthetic construct
  misc_feature 1..44: note = oligonucleotide decoy
  source 1..44: mol_type = other DNA
aaaatggctccatcgatgacataacacctgtttgtttacacgtg

SEQ ID NO: 1347 - DNA, 44 bp, synthetic construct
  misc_feature 1..44: note = oligonucleotide decoy
  source 1..44: mol_type = other DNA
aaaatggctccatcgatgacgtaacacctgtttatttacacgtg

SEQ ID NO: 1348 - DNA, 44 bp, synthetic construct
  misc_feature 1..44: note = oligonucleotide decoy
  source 1..44: mol_type = other DNA
aaaatggctccatcgatgacgtaacacctgtttgtttacacgtg

SEQ ID NO: 1349 - DNA, 44 bp, synthetic construct
  misc_feature 1..44: note = oligonucleotide decoy
  source 1..44: mol_type = other DNA
aaaatggctccatcgatgatataacacctgtttatttacacgtg

SEQ ID NO: 1350 - DNA, 44 bp, synthetic construct
  misc_feature 1..44: note = oligonucleotide decoy
  source 1..44: mol_type = other DNA
aaaatggctccatcgatgatataacacctgtttgtttacacgtg

SEQ ID NO: 1351 - DNA, 44 bp, synthetic construct
  misc_feature 1..44: note = oligonucleotide decoy
  source 1..44: mol_type = other DNA
aaaatggctccatcgatgatgtaacacctgtttatttacacgtg

SEQ ID NO: 1352 - DNA, 44 bp, synthetic construct
  misc_feature 1..44: note = oligonucleotide decoy
  source 1..44: mol_type = other DNA
aaaatggctccatcgatgatgtaacacctgtttgtttacacgtg

SEQ ID NO: 1353 - DNA, 44 bp, synthetic construct
  misc_feature 1..44: note = oligonucleotide decoy
  source 1..44: mol_type = other DNA
aaaatggctccatcggtgacataacacctgtttatttacacgtg

SEQ ID NO: 1354 - DNA, 44 bp, synthetic construct
  misc_feature 1..44: note = oligonucleotide decoy
  source 1..44: mol_type = other DNA
aaaatggctccatcggtgacataacacctgtttgtttacacgtg

SEQ ID NO: 1355 - DNA, 44 bp, synthetic construct
  misc_feature 1..44: note = oligonucleotide decoy
  source 1..44: mol_type = other DNA
aaaatggctccatcggtgacgtaacacctgtttatttacacgtg

SEQ ID NO: 1356 - DNA, 44 bp, synthetic construct
  misc_feature 1..44: note = oligonucleotide decoy
  source 1..44: mol_type = other DNA
aaaatggctccatcggtgacgtaacacctgtttgtttacacgtg

SEQ ID NO: 1357 - DNA, 44 bp, synthetic construct
  misc_feature 1..44: note = oligonucleotide decoy
  source 1..44: mol_type = other DNA
aaaatggctccatcggtgatataacacctgtttatttacacgtg

SEQ ID NO: 1358 - DNA, 44 bp, synthetic construct
  misc_feature 1..44: note = oligonucleotide decoy
  source 1..44: mol_type = other DNA
aaaatggctccatcggtgatataacacctgtttgtttacacgtg

SEQ ID NO: 1359 - DNA, 44 bp, synthetic construct
  misc_feature 1..44: note = oligonucleotide decoy
  source 1..44: mol_type = other DNA
aaaatggctccatcggtgatgtaacacctgtttatttacacgtg

SEQ ID NO: 1360 - DNA, 44 bp, synthetic construct
  misc_feature 1..44: note = oligonucleotide decoy
  source 1..44: mol_type = other DNA
aaaatggctccatcggtgatgtaacacctgtttgtttacacgtg

SEQ ID NO: 1361 - DNA, 44 bp, synthetic construct
  misc_feature 1..44: note = oligonucleotide decoy
  source 1..44: mol_type = other DNA
aagatggctccaccgatgacataacacctgtttatttacacgtg

SEQ ID NO: 1362 - DNA, 44 bp, synthetic construct
  misc_feature 1..44: note = oligonucleotide decoy
  source 1..44: mol_type = other DNA
aagatggctccaccgatgacataacacctgtttgtttacacgtg

SEQ ID NO: 1363 - DNA, 44 bp, synthetic construct
  misc_feature 1..44: note = oligonucleotide decoy
  source 1..44: mol_type = other DNA
aagatggctccaccgatgacgtaacacctgtttatttacacgtg

SEQ ID NO: 1364 - DNA, 44 bp, synthetic construct
  misc_feature 1..44: note = oligonucleotide decoy
  source 1..44: mol_type = other DNA
aagatggctccaccgatgacgtaacacctgtttgtttacacgtg

SEQ ID NO: 1365 - DNA, 44 bp, synthetic construct
  misc_feature 1..44: note = oligonucleotide decoy
  source 1..44: mol_type = other DNA
aagatggctccaccgatgatataacacctgtttatttacacgtg

SEQ ID NO: 1366 - DNA, 44 bp, synthetic construct
  misc_feature 1..44: note = oligonucleotide decoy
  source 1..44: mol_type = other DNA
aagatggctccaccgatgatataacacctgtttgtttacacgtg

SEQ ID NO: 1367 - DNA, 44 bp, synthetic construct
  misc_feature 1..44: note = oligonucleotide decoy
  source 1..44: mol_type = other DNA
aagatggctccaccgatgatgtaacacctgtttatttacacgtg

SEQ ID NO: 1368 - DNA, 44 bp, synthetic construct
  misc_feature 1..44: note = oligonucleotide decoy
  source 1..44: mol_type = other DNA
aagatggctccaccgatgatgtaacacctgtttgtttacacgtg

SEQ ID NO: 1369 - DNA, 44 bp, synthetic construct
  misc_feature 1..44: note = oligonucleotide decoy
  source 1..44: mol_type = other DNA
aagatggctccaccggtgacataacacctgtttatttacacgtg

SEQ ID NO: 1370 - DNA, 44 bp, synthetic construct
  misc_feature 1..44: note = oligonucleotide decoy
  source 1..44: mol_type = other DNA
aagatggctccaccggtgacataacacctgtttgtttacacgtg

SEQ ID NO: 1371 - DNA, 44 bp, synthetic construct
  misc_feature 1..44: note = oligonucleotide decoy
  source 1..44: mol_type = other DNA
aagatggctccaccggtgacgtaacacctgtttatttacacgtg

SEQ ID NO: 1372 - DNA, 44 bp, synthetic construct
  misc_feature 1..44: note = oligonucleotide decoy
  source 1..44: mol_type = other DNA
aagatggctccaccggtgacgtaacacctgtttgtttacacgtg

SEQ ID NO: 1373 - DNA, 44 bp, synthetic construct
  misc_feature 1..44: note = oligonucleotide decoy
  source 1..44: mol_type = other DNA
aagatggctccaccggtgatataacacctgtttatttacacgtg

SEQ ID NO: 1374 - DNA, 44 bp, synthetic construct
  misc_feature 1..44: note = oligonucleotide decoy
  source 1..44: mol_type = other DNA
aagatggctccaccggtgatataacacctgtttgtttacacgtg

SEQ ID NO: 1375 - DNA, 44 bp, synthetic construct
  misc_feature 1..44: note = oligonucleotide decoy
  source 1..44: mol_type = other DNA
aagatggctccaccggtgatgtaacacctgtttatttacacgtg

SEQ ID NO: 1376 - DNA, 44 bp, synthetic construct
  misc_feature 1..44: note = oligonucleotide decoy
  source 1..44: mol_type = other DNA
aagatggctccaccggtgatgtaacacctgtttgtttacacgtg

SEQ ID NO: 1377 - DNA, 44 bp, synthetic construct
  misc_feature 1..44: note = oligonucleotide decoy
  source 1..44: mol_type = other DNA
aaaatggctccaccgatgacataacacctgtttatttacacgtg

SEQ ID NO: 1378 - DNA, 44 bp, synthetic construct
  misc_feature 1..44: note = oligonucleotide decoy
  source 1..44: mol_type = other DNA
aaaatggctccaccgatgacataacacctgtttgtttacacgtg

SEQ ID NO: 1379 - DNA, 44 bp, synthetic construct
  misc_feature 1..44: note = oligonucleotide decoy
  source 1..44: mol_type = other DNA
aaaatggctccaccgatgacgtaacacctgtttatttacacgtg

SEQ ID NO: 1380 - DNA, 44 bp, synthetic construct
  misc_feature 1..44: note = oligonucleotide decoy
  source 1..44: mol_type = other DNA
aaaatggctccaccgatgacgtaacacctgtttgtttacacgtg

SEQ ID NO: 1381 - DNA, 44 bp, synthetic construct
  misc_feature 1..44: note = oligonucleotide decoy
  source 1..44: mol_type = other DNA
aaaatggctccaccgatgatataacacctgtttatttacacgtg

SEQ ID NO: 1382 - DNA, 44 bp, synthetic construct
  misc_feature 1..44: note = oligonucleotide decoy
  source 1..44: mol_type = other DNA
aaaatggctccaccgatgatataacacctgtttgtttacacgtg

SEQ ID NO: 1383 - DNA, 44 bp, synthetic construct
  misc_feature 1..44: note = oligonucleotide decoy
  source 1..44: mol_type = other DNA
aaaatggctccaccgatgatgtaacacctgtttatttacacgtg

SEQ ID NO: 1384 - DNA, 44 bp, synthetic construct
  misc_feature 1..44: note = oligonucleotide decoy
  source 1..44: mol_type = other DNA
aaaatggctccaccgatgatgtaacacctgtttgtttacacgtg

SEQ ID NO: 1385 - DNA, 44 bp, synthetic construct
  misc_feature 1..44: note = oligonucleotide decoy
  source 1..44: mol_type = other DNA
aaaatggctccaccggtgacataacacctgtttatttacacgtg

SEQ ID NO: 1386 - DNA, 44 bp, synthetic construct
  misc_feature 1..44: note = oligonucleotide decoy
  source 1..44: mol_type = other DNA
aaaatggctccaccggtgacataacacctgtttgtttacacgtg

SEQ ID NO: 1387 - DNA, 44 bp, synthetic construct
  misc_feature 1..44: note = oligonucleotide decoy
  source 1..44: mol_type = other DNA
aaaatggctccaccggtgacgtaacacctgtttatttacacgtg

SEQ ID NO: 1388 - DNA, 44 bp, synthetic construct
  misc_feature 1..44: note = oligonucleotide decoy
  source 1..44: mol_type = other DNA
aaaatggctccaccggtgacgtaacacctgtttgtttacacgtg

SEQ ID NO: 1389 - DNA, 44 bp, synthetic construct
  misc_feature 1..44: note = oligonucleotide decoy
  source 1..44: mol_type = other DNA
aaaatggctccaccggtgatataacacctgtttatttacacgtg

SEQ ID NO: 1390 - DNA, 44 bp, synthetic construct
  misc_feature 1..44: note = oligonucleotide decoy
  source 1..44: mol_type = other DNA
aaaatggctccaccggtgatataacacctgtttgtttacacgtg

SEQ ID NO: 1391 - DNA, 44 bp, synthetic construct
  misc_feature 1..44: note = oligonucleotide decoy
  source 1..44: mol_type = other DNA
aaaatggctccaccggtgatgtaacacctgtttatttacacgtg

SEQ ID NO: 1392 - DNA, 44 bp, synthetic construct
  misc_feature 1..44: note = oligonucleotide decoy
  source 1..44: mol_type = other DNA
aaaatggctccaccggtgatgtaacacctgtttgtttacacgtg

SEQ ID NO: 1393 - DNA, 44 bp, synthetic construct
  misc_feature 1..44: note = oligonucleotide decoy
  source 1..44: mol_type = other DNA
aagatggctccatcgatgttacatcacctgtttatttacacgtg

SEQ ID NO: 1394 - DNA, 44 bp, synthetic construct
  misc_feature 1..44: note = oligonucleotide decoy
  source 1..44: mol_type = other DNA
aagatggctccatcgatgttacatcacctgtttgtttacacgtg

SEQ ID NO: 1395 - DNA, 44 bp, synthetic construct
  misc_feature 1..44: note = oligonucleotide decoy
  source 1..44: mol_type = other DNA
aagatggctccatcgatgttacgtcacctgtttatttacacgtg

SEQ ID NO: 1396 - DNA, 44 bp, synthetic construct
  misc_feature 1..44: note = oligonucleotide decoy
  source 1..44: mol_type = other DNA
aagatggctccatcgatgttacgtcacctgtttgtttacacgtg

SEQ ID NO: 1397 - DNA, 44 bp, synthetic construct
  misc_feature 1..44: note = oligonucleotide decoy
  source 1..44: mol_type = other DNA
aagatggctccatcgatgttatatcacctgtttatttacacgtg

SEQ ID NO: 1398 - DNA, 44 bp, synthetic construct
  misc_feature 1..44: note = oligonucleotide decoy
  source 1..44: mol_type = other DNA
aagatggctccatcgatgttatatcacctgtttgtttacacgtg

SEQ ID NO: 1399 - DNA, 44 bp, synthetic construct
  misc_feature 1..44: note = oligonucleotide decoy
  source 1..44: mol_type = other DNA
aagatggctccatcgatgttatgtcacctgtttatttacacgtg

SEQ ID NO: 1400 - DNA, 44 bp, synthetic construct
  misc_feature 1..44: note = oligonucleotide decoy
  source 1..44: mol_type = other DNA
aagatggctccatcgatgttatgtcacctgtttgtttacacgtg

SEQ ID NO: 1401 - DNA, 44 bp, synthetic construct
  misc_feature 1..44: note = oligonucleotide decoy
  source 1..44: mol_type = other DNA
aagatggctccatcgctgttacatcacctgtttatttacacgtg

SEQ ID NO: 1402 - DNA, 44 bp, synthetic construct
  misc_feature 1..44: note = oligonucleotide decoy
  source 1..44: mol_type = other DNA
aagatggctccatcgctgttacatcacctgtttgtttacacgtg

SEQ ID NO: 1403 - DNA, 44 bp, synthetic construct
  misc_feature 1..44: note = oligonucleotide decoy
  source 1..44: mol_type = other DNA
aagatggctccatcgctgttacgtcacctgtttatttacacgtg

SEQ ID NO: 1404 - DNA, 44 bp, synthetic construct
  misc_feature 1..44: note = oligonucleotide decoy
  source 1..44: mol_type = other DNA
aagatggctccatcgctgttacgtcacctgtttgtttacacgtg

SEQ ID NO: 1405 - DNA, 44 bp, synthetic construct
  misc_feature 1..44: note = oligonucleotide decoy
  source 1..44: mol_type = other DNA
aagatggctccatcgctgttatatcacctgtttatttacacgtg

SEQ ID NO: 1406 - DNA, 44 bp, synthetic construct
  misc_feature 1..44: note = oligonucleotide decoy
  source 1..44: mol_type = other DNA
aagatggctccatcgctgttatatcacctgtttgtttacacgtg

SEQ ID NO: 1407 - DNA, 44 bp, synthetic construct
  misc_feature 1..44: note = oligonucleotide decoy
  source 1..44: mol_type = other DNA
aagatggctccatcgctgttatgtcacctgtttatttacacgtg

SEQ ID NO: 1408 - DNA, 44 bp, synthetic construct
  misc_feature 1..44: note = oligonucleotide decoy
  source 1..44: mol_type = other DNA
aagatggctccatcgctgttatgtcacctgtttgtttacacgtg

SEQ ID NO: 1409 - DNA, 44 bp, synthetic construct
  misc_feature 1..44: note = oligonucleotide decoy
  source 1..44: mol_type = other DNA
aagatggctccatcggtgttacatcacctgtttatttacacgtg

SEQ ID NO: 1410 - DNA, 44 bp, synthetic construct
  misc_feature 1..44: note = oligonucleotide decoy
  source 1..44: mol_type = other DNA
aagatggctccatcggtgttacatcacctgtttgtttacacgtg

SEQ ID NO: 1411 - DNA, 44 bp, synthetic construct
  misc_feature 1..44: note = oligonucleotide decoy
  source 1..44: mol_type = other DNA
aagatggctccatcggtgttacgtcacctgtttatttacacgtg

SEQ ID NO: 1412 - DNA, 44 bp, synthetic construct
  misc_feature 1..44: note = oligonucleotide decoy
  source 1..44: mol_type = other DNA
aagatggctccatcggtgttacgtcacctgtttgtttacacgtg

SEQ ID NO: 1413 - DNA, 44 bp, synthetic construct
  misc_feature 1..44: note = oligonucleotide decoy
  source 1..44: mol_type = other DNA
aagatggctccatcggtgttatatcacctgtttatttacacgtg

SEQ ID NO: 1414 - DNA, 44 bp, synthetic construct
  misc_feature 1..44: note = oligonucleotide decoy
  source 1..44: mol_type = other DNA
aagatggctccatcggtgttatatcacctgtttgtttacacgtg

SEQ ID NO: 1415 - DNA, 44 bp, synthetic construct
  misc_feature 1..44: note = oligonucleotide decoy
  source 1..44: mol_type = other DNA
aagatggctccatcggtgttatgtcacctgtttatttacacgtg

SEQ ID NO: 1416 - DNA, 44 bp, synthetic construct
  misc_feature 1..44: note = oligonucleotide decoy
  source 1..44: mol_type = other DNA
aagatggctccatcggtgttatgtcacctgtttgtttacacgtg

SEQ ID NO: 1417 - DNA, 44 bp, synthetic construct
  misc_feature 1..44: note = oligonucleotide decoy
  source 1..44: mol_type = other DNA
aagatggctccatcgttgttacatcacctgtttatttacacgtg

SEQ ID NO: 1418 - DNA, 44 bp, synthetic construct
  misc_feature 1..44: note = oligonucleotide decoy
  source 1..44: mol_type = other DNA
aagatggctccatcgttgttacatcacctgtttgtttacacgtg

SEQ ID NO: 1419 - DNA, 44 bp, synthetic construct
  misc_feature 1..44: note = oligonucleotide decoy
  source 1..44: mol_type = other DNA
aagatggctccatcgttgttacgtcacctgtttatttacacgtg

SEQ ID NO: 1420 - DNA, 44 bp, synthetic construct
  misc_feature 1..44: note = oligonucleotide decoy
  source 1..44: mol_type = other DNA
aagatggctccatcgttgttacgtcacctgtttgtttacacgtg

SEQ ID NO: 1421 - DNA, 44 bp, synthetic construct
  misc_feature 1..44: note = oligonucleotide decoy
  source 1..44: mol_type = other DNA
aagatggctccatcgttgttatatcacctgtttatttacacgtg

SEQ ID NO: 1422 - DNA, 44 bp, synthetic construct
  misc_feature 1..44: note = oligonucleotide decoy
  source 1..44: mol_type = other DNA
aagatggctccatcgttgttatatcacctgtttgtttacacgtg

SEQ ID NO: 1423 - DNA, 44 bp, synthetic construct
  misc_feature 1..44: note = oligonucleotide decoy
  source 1..44: mol_type = other DNA
aagatggctccatcgttgttatgtcacctgtttatttacacgtg

SEQ ID NO: 1424 - DNA, 44 bp, synthetic construct
  misc_feature 1..44: note = oligonucleotide decoy
  source 1..44: mol_type = other DNA
aagatggctccatcgttgttatgtcacctgtttgtttacacgtg

SEQ ID NO: 1425 - DNA, 44 bp, synthetic construct
  misc_feature 1..44: note = oligonucleotide decoy
  source 1..44: mol_type = other DNA
aaaatggctccatcgatgttacatcacctgtttatttacacgtg

SEQ ID NO: 1426 - DNA, 44 bp, synthetic construct
  misc_feature 1..44: note = oligonucleotide decoy
  source 1..44: mol_type = other DNA
aaaatggctccatcgatgttacatcacctgtttgtttacacgtg

SEQ ID NO: 1427 - DNA, 44 bp, synthetic construct
  misc_feature 1..44: note = oligonucleotide decoy
  source 1..44: mol_type = other DNA
aaaatggctccatcgatgttacgtcacctgtttatttacacgtg

SEQ ID NO: 1428 - DNA, 44 bp, synthetic construct
  misc_feature 1..44: note = oligonucleotide decoy
  source 1..44: mol_type = other DNA
aaaatggctccatcgatgttacgtcacctgtttgtttacacgtg

SEQ ID NO: 1429 - DNA, 44 bp, synthetic construct
  misc_feature 1..44: note = oligonucleotide decoy
  source 1..44: mol_type = other DNA
aaaatggctccatcgatgttatatcacctgtttatttacacgtg

SEQ ID NO: 1430 - DNA, 44 bp, synthetic construct
  misc_feature 1..44: note = oligonucleotide decoy
  source 1..44: mol_type = other DNA
aaaatggctccatcgatgttatatcacctgtttgtttacacgtg

SEQ ID NO: 1431 - DNA, 44 bp, synthetic construct
  misc_feature 1..44: note = oligonucleotide decoy
  source 1..44: mol_type = other DNA
aaaatggctccatcgatgttatgtcacctgtttatttacacgtg

SEQ ID NO: 1432 - DNA, 44 bp, synthetic construct
  misc_feature 1..44: note = oligonucleotide decoy
  source 1..44: mol_type = other DNA
aaaatggctccatcgatgttatgtcacctgtttgtttacacgtg

SEQ ID NO: 1433 - DNA, 44 bp, synthetic construct
  misc_feature 1..44: note = oligonucleotide decoy
  source 1..44: mol_type = other DNA
aaaatggctccatcgctgttacatcacctgtttatttacacgtg

SEQ ID NO: 1434 - DNA, 44 bp, synthetic construct
  misc_feature 1..44: note = oligonucleotide decoy
  source 1..44: mol_type = other DNA
aaaatggctccatcgctgttacatcacctgtttgtttacacgtg

SEQ ID NO: 1435 - DNA, 44 bp, synthetic construct
  misc_feature 1..44: note = oligonucleotide decoy
  source 1..44: mol_type = other DNA
aaaatggctccatcgctgttacgtcacctgtttatttacacgtg

SEQ ID NO: 1436 - DNA, 44 bp, synthetic construct
  misc_feature 1..44: note = oligonucleotide decoy
  source 1..44: mol_type = other DNA
aaaatggctccatcgctgttacgtcacctgtttgtttacacgtg

SEQ ID NO: 1437 - DNA, 44 bp, synthetic construct
  misc_feature 1..44: note = oligonucleotide decoy
  source 1..44: mol_type = other DNA
aaaatggctccatcgctgttatatcacctgtttatttacacgtg

SEQ ID NO: 1438 - DNA, 44 bp, synthetic construct
  misc_feature 1..44: note = oligonucleotide decoy
  source 1..44: mol_type = other DNA
aaaatggctccatcgctgttatatcacctgtttgtttacacgtg

SEQ ID NO: 1439 - DNA, 44 bp, synthetic construct
  misc_feature 1..44: note = oligonucleotide decoy
  source 1..44: mol_type = other DNA
aaaatggctccatcgctgttatgtcacctgtttatttacacgtg

SEQ ID NO: 1440 - DNA, 44 bp, synthetic construct
  misc_feature 1..44: note = oligonucleotide decoy
  source 1..44: mol_type = other DNA
aaaatggctccatcgctgttatgtcacctgtttgtttacacgtg

SEQ ID NO: 1441 - DNA, 44 bp, synthetic construct
  misc_feature 1..44: note = oligonucleotide decoy
  source 1..44: mol_type = other DNA
aaaatggctccatcggtgttacatcacctgtttatttacacgtg

SEQ ID NO: 1442 - DNA, 44 bp, synthetic construct
  misc_feature 1..44: note = oligonucleotide decoy
  source 1..44: mol_type = other DNA
aaaatggctccatcggtgttacatcacctgtttgtttacacgtg

SEQ ID NO: 1443 - DNA, 44 bp, synthetic construct
  misc_feature 1..44: note = oligonucleotide decoy
  source 1..44: mol_type = other DNA
aaaatggctccatcggtgttacgtcacctgtttatttacacgtg

SEQ ID NO: 1444 - DNA, 44 bp, synthetic construct
  misc_feature 1..44: note = oligonucleotide decoy
  source 1..44: mol_type = other DNA
aaaatggctccatcggtgttacgtcacctgtttgtttacacgtg

SEQ ID NO: 1445 - DNA, 44 bp, synthetic construct
  misc_feature 1..44: note = oligonucleotide decoy
  source 1..44: mol_type = other DNA
aaaatggctccatcggtgttatatcacctgtttatttacacgtg

SEQ ID NO: 1446 - DNA, 44 bp, synthetic construct
  misc_feature 1..44: note = oligonucleotide decoy
  source 1..44: mol_type = other DNA
aaaatggctccatcggtgttatatcacctgtttgtttacacgtg

SEQ ID NO: 1447 - DNA, 44 bp, synthetic construct
  misc_feature 1..44: note = oligonucleotide decoy
  source 1..44: mol_type = other DNA
aaaatggctccatcggtgttatgtcacctgtttatttacacgtg

SEQ ID NO: 1448 - DNA, 44 bp, synthetic construct
  misc_feature 1..44: note = oligonucleotide decoy
  source 1..44: mol_type = other DNA
aaaatggctccatcggtgttatgtcacctgtttgtttacacgtg

SEQ ID NO: 1449 - DNA, 44 bp, synthetic construct
  misc_feature 1..44: note = oligonucleotide decoy
  source 1..44: mol_type = other DNA
aaaatggctccatcgttgttacatcacctgtttatttacacgtg

SEQ ID NO: 1450 - DNA, 44 bp, synthetic construct
  misc_feature 1..44: note = oligonucleotide decoy
  source 1..44: mol_type = other DNA
aaaatggctccatcgttgttacatcacctgtttgtttacacgtg

SEQ ID NO: 1451 - DNA, 44 bp, synthetic construct
  misc_feature 1..44: note = oligonucleotide decoy
  source 1..44: mol_type = other DNA
aaaatggctccatcgttgttacgtcacctgtttatttacacgtg

SEQ ID NO: 1452 - DNA, 44 bp, synthetic construct
  misc_feature 1..44: note = oligonucleotide decoy
  source 1..44: mol_type = other DNA
aaaatggctccatcgttgttacgtcacctgtttgtttacacgtg

SEQ ID NO: 1453 - DNA, 44 bp, synthetic construct
  misc_feature 1..44: note = oligonucleotide decoy
  source 1..44: mol_type = other DNA
aaaatggctccatcgttgttatatcacctgtttatttacacgtg

SEQ ID NO: 1454 - DNA, 44 bp, synthetic construct
  misc_feature 1..44: note = oligonucleotide decoy
  source 1..44: mol_type = other DNA
aaaatggctccatcgttgttatatcacctgtttgtttacacgtg

SEQ ID NO: 1455 - DNA, 44 bp, synthetic construct
  misc_feature 1..44: note = oligonucleotide decoy
  source 1..44: mol_type = other DNA
aaaatggctccatcgttgttatgtcacctgtttatttacacgtg

SEQ ID NO: 1456 - DNA, 44 bp, synthetic construct
  misc_feature 1..44: note = oligonucleotide decoy
  source 1..44: mol_type = other DNA
aaaatggctccatcgttgttatgtcacctgtttgtttacacgtg

SEQ ID NO: 1457 - DNA, 44 bp, synthetic construct
  misc_feature 1..44: note = oligonucleotide decoy
  source 1..44: mol_type = other DNA
aagatggctccaccgatgttacatcacctgtttatttacacgtg

SEQ ID NO: 1458 - DNA, 44 bp, synthetic construct
  misc_feature 1..44: note = oligonucleotide decoy
  source 1..44: mol_type = other DNA
aagatggctccaccgatgttacatcacctgtttgtttacacgtg

SEQ ID NO: 1459 - DNA, 44 bp, synthetic construct
  misc_feature 1..44: note = oligonucleotide decoy
  source 1..44: mol_type = other DNA
aagatggctccaccgatgttacgtcacctgtttatttacacgtg

SEQ ID NO: 1460 - DNA, 44 bp, synthetic construct
  misc_feature 1..44: note = oligonucleotide decoy
  source 1..44: mol_type = other DNA
aagatggctccaccgatgttacgtcacctgtttgtttacacgtg

SEQ ID NO: 1461 - DNA, 44 bp, synthetic construct
  misc_feature 1..44: note = oligonucleotide decoy
  source 1..44: mol_type = other DNA
aagatggctccaccgatgttatatcacctgtttatttacacgtg

SEQ ID NO: 1462 - DNA, 44 bp, synthetic construct
  misc_feature 1..44: note = oligonucleotide decoy
  source 1..44: mol_type = other DNA
aagatggctccaccgatgttatatcacctgtttgtttacacgtg

SEQ ID NO: 1463 - DNA, 44 bp, synthetic construct
  misc_feature 1..44: note = oligonucleotide decoy
  source 1..44: mol_type = other DNA
aagatggctccaccgatgttatgtcacctgtttatttacacgtg

SEQ ID NO: 1464 - DNA, 44 bp, synthetic construct
  misc_feature 1..44: note = oligonucleotide decoy
  source 1..44: mol_type = other DNA
aagatggctccaccgatgttatgtcacctgtttgtttacacgtg

SEQ ID NO: 1465 - DNA, 44 bp, synthetic construct
  misc_feature 1..44: note = oligonucleotide decoy
  source 1..44: mol_type = other DNA
aagatggctccaccgctgttacatcacctgtttatttacacgtg

SEQ ID NO: 1466 - DNA, 44 bp, synthetic construct
  misc_feature 1..44: note = oligonucleotide decoy
  source 1..44: mol_type = other DNA
aagatggctccaccgctgttacatcacctgtttgtttacacgtg

SEQ ID NO: 1467 - DNA, 44 bp, synthetic construct
  misc_feature 1..44: note = oligonucleotide decoy
  source 1..44: mol_type = other DNA
aagatggctccaccgctgttacgtcacctgtttatttacacgtg

SEQ ID NO: 1468 - DNA, 44 bp, synthetic construct
  misc_feature 1..44: note = oligonucleotide decoy
  source 1..44: mol_type = other DNA
aagatggctccaccgctgttacgtcacctgtttgtttacacgtg

SEQ ID NO: 1469 - DNA, 44 bp, synthetic construct
  misc_feature 1..44: note = oligonucleotide decoy
  source 1..44: mol_type = other DNA
aagatggctccaccgctgttatatcacctgtttatttacacgtg

SEQ ID NO: 1470 - DNA, 44 bp, synthetic construct
  misc_feature 1..44: note = oligonucleotide decoy
  source 1..44: mol_type = other DNA
aagatggctccaccgctgttatatcacctgtttgtttacacgtg

SEQ ID NO: 1471 - DNA, 44 bp, synthetic construct
  misc_feature 1..44: note = oligonucleotide decoy
  source 1..44: mol_type = other DNA
aagatggctccaccgctgttatgtcacctgtttatttacacgtg

SEQ ID NO: 1472 - DNA, 44 bp, synthetic construct
  misc_feature 1..44: note = oligonucleotide decoy
  source 1..44: mol_type = other DNA
aagatggctccaccgctgttatgtcacctgtttgtttacacgtg

SEQ ID NO: 1473 - DNA, 44 bp, synthetic construct
  misc_feature 1..44: note = oligonucleotide decoy
  source 1..44: mol_type = other DNA
aagatggctccaccggtgttacatcacctgtttatttacacgtg

SEQ ID NO: 1474 - DNA, 44 bp, synthetic construct
  misc_feature 1..44: note = oligonucleotide decoy
  source 1..44: mol_type = other DNA
aagatggctccaccggtgttacatcacctgtttgtttacacgtg

SEQ ID NO: 1475 - DNA, 44 bp, synthetic construct
  misc_feature 1..44: note = oligonucleotide decoy
  source 1..44: mol_type = other DNA
aagatggctccaccggtgttacgtcacctgtttatttacacgtg

SEQ ID NO: 1476 - DNA, 44 bp, synthetic construct
  misc_feature 1..44: note = oligonucleotide decoy
  source 1..44: mol_type = other DNA
aagatggctccaccggtgttacgtcacctgtttgtttacacgtg

SEQ ID NO: 1477 - DNA, 44 bp, synthetic construct
  misc_feature 1..44: note = oligonucleotide decoy
  source 1..44: mol_type = other DNA
aagatggctccaccggtgttatatcacctgtttatttacacgtg

SEQ ID NO: 1478 - DNA, 44 bp, synthetic construct
  misc_feature 1..44: note = oligonucleotide decoy
  source 1..44: mol_type = other DNA
aagatggctccaccggtgttatatcacctgtttgtttacacgtg

SEQ ID NO: 1479 - DNA, 44 bp, synthetic construct
  misc_feature 1..44: note = oligonucleotide decoy
  source 1..44: mol_type = other DNA
aagatggctccaccggtgttatgtcacctgtttatttacacgtg

SEQ ID NO: 1480 - DNA, 44 bp, synthetic construct
  misc_feature 1..44: note = oligonucleotide decoy
  source 1..44: mol_type = other DNA
aagatggctccaccggtgttatgtcacctgtttgtttacacgtg

SEQ ID NO: 1481 - DNA, 44 bp, synthetic construct
  misc_feature 1..44: note = oligonucleotide decoy
  source 1..44: mol_type = other DNA
aagatggctccaccgttgttacatcacctgtttatttacacgtg

SEQ ID NO: 1482 - DNA, 44 bp, synthetic construct
  misc_feature 1..44: note = oligonucleotide decoy
  source 1..44: mol_type = other DNA
aagatggctccaccgttgttacatcacctgtttgtttacacgtg

SEQ ID NO: 1483 - DNA, 44 bp, synthetic construct
  misc_feature 1..44: note = oligonucleotide decoy
  source 1..44: mol_type = other DNA
aagatggctccaccgttgttacgtcacctgtttatttacacgtg

SEQ ID NO: 1484 - DNA, 44 bp, synthetic construct
  misc_feature 1..44: note = oligonucleotide decoy
  source 1..44: mol_type = other DNA
aagatggctccaccgttgttacgtcacctgtttgtttacacgtg

SEQ ID NO: 1485 - DNA, 44 bp, synthetic construct
  misc_feature 1..44: note = oligonucleotide decoy
  source 1..44: mol_type = other DNA
aagatggctccaccgttgttatatcacctgtttatttacacgtg

SEQ ID NO: 1486 - DNA, 44 bp, synthetic construct
  misc_feature 1..44: note = oligonucleotide decoy
  source 1..44: mol_type = other DNA
aagatggctccaccgttgttatatcacctgtttgtttacacgtg

SEQ ID NO: 1487 - DNA, 44 bp, synthetic construct
  misc_feature 1..44: note = oligonucleotide decoy
  source 1..44: mol_type = other DNA
aagatggctccaccgttgttatgtcacctgtttatttacacgtg

SEQ ID NO: 1488 - DNA, 44 bp, synthetic construct
  misc_feature 1..44: note = oligonucleotide decoy
  source 1..44: mol_type = other DNA
aagatggctccaccgttgttatgtcacctgtttgtttacacgtg

SEQ ID NO: 1489 - DNA, 44 bp, synthetic construct
  misc_feature 1..44: note = oligonucleotide decoy
  source 1..44: mol_type = other DNA
aaaatggctccaccgatgttacatcacctgtttatttacacgtg

SEQ ID NO: 1490 - DNA, 44 bp, synthetic construct
  misc_feature 1..44: note = oligonucleotide decoy
  source 1..44: mol_type = other DNA
aaaatggctccaccgatgttacatcacctgtttgtttacacgtg

SEQ ID NO: 1491 - DNA, 44 bp, synthetic construct
  misc_feature 1..44: note = oligonucleotide decoy
  source 1..44: mol_type = other DNA
aaaatggctccaccgatgttacgtcacctgtttatttacacgtg

SEQ ID NO: 1492 - DNA, 44 bp, synthetic construct
  misc_feature 1..44: note = oligonucleotide decoy
  source 1..44: mol_type = other DNA
aaaatggctccaccgatgttacgtcacctgtttgtttacacgtg

SEQ ID NO: 1493 - DNA, 44 bp, synthetic construct
  misc_feature 1..44: note = oligonucleotide decoy
  source 1..44: mol_type = other DNA
aaaatggctccaccgatgttatatcacctgtttatttacacgtg

SEQ ID NO: 1494 - DNA, 44 bp, synthetic construct
  misc_feature 1..44: note = oligonucleotide decoy
  source 1..44: mol_type = other DNA
aaaatggctccaccgatgttatatcacctgtttgtttacacgtg

SEQ ID NO: 1495 - DNA, 44 bp, synthetic construct
  misc_feature 1..44: note = oligonucleotide decoy
  source 1..44: mol_type = other DNA
aaaatggctccaccgatgttatgtcacctgtttatttacacgtg

SEQ ID NO: 1496 - DNA, 44 bp, synthetic construct
  misc_feature 1..44: note = oligonucleotide decoy
  source 1..44: mol_type = other DNA
aaaatggctccaccgatgttatgtcacctgtttgtttacacgtg

SEQ ID NO: 1497 - DNA, 44 bp, synthetic construct
  misc_feature 1..44: note = oligonucleotide decoy
  source 1..44: mol_type = other DNA
aaaatggctccaccgctgttacatcacctgtttatttacacgtg

SEQ ID NO: 1498 - DNA, 44 bp, synthetic construct
  misc_feature 1..44: note = oligonucleotide decoy
  source 1..44: mol_type = other DNA
aaaatggctccaccgctgttacatcacctgtttgtttacacgtg

SEQ ID NO: 1499 - DNA, 44 bp, synthetic construct
  misc_feature 1..44: note = oligonucleotide decoy
  source 1..44: mol_type = other DNA
aaaatggctccaccgctgttacgtcacctgtttatttacacgtg

SEQ ID NO: 1500 - DNA, 44 bp, synthetic construct
  misc_feature 1..44: note = oligonucleotide decoy
  source 1..44: mol_type = other DNA
aaaatggctccaccgctgttacgtcacctgtttgtttacacgtg

SEQ ID NO: 1501 - DNA, 44 bp, synthetic construct
  misc_feature 1..44: note = oligonucleotide decoy
  source 1..44: mol_type = other DNA
aaaatggctccaccgctgttatatcacctgtttatttacacgtg

SEQ ID NO: 1502 - DNA, 44 bp, synthetic construct
  misc_feature 1..44: note = oligonucleotide decoy
  source 1..44: mol_type = other DNA
aaaatggctccaccgctgttatatcacctgtttgtttacacgtg

SEQ ID NO: 1503 - DNA, 44 bp, synthetic construct
  misc_feature 1..44: note = oligonucleotide decoy
  source 1..44: mol_type = other DNA
aaaatggctccaccgctgttatgtcacctgtttatttacacgtg

SEQ ID NO: 1504 - DNA, 44 bp, synthetic construct
  misc_feature 1..44: note = oligonucleotide decoy
  source 1..44: mol_type = other DNA
aaaatggctccaccgctgttatgtcacctgtttgtttacacgtg

SEQ ID NO: 1505 - DNA, 44 bp, synthetic construct
  misc_feature 1..44: note = oligonucleotide decoy
  source 1..44: mol_type = other DNA
aaaatggctccaccggtgttacatcacctgtttatttacacgtg

SEQ ID NO: 1506 - DNA, 44 bp, synthetic construct
  misc_feature 1..44: note = oligonucleotide decoy
  source 1..44: mol_type = other DNA
aaaatggctccaccggtgttacatcacctgtttgtttacacgtg

SEQ ID NO: 1507 - DNA, 44 bp, synthetic construct
  misc_feature 1..44: note = oligonucleotide decoy
  source 1..44: mol_type = other DNA
aaaatggctccaccggtgttacgtcacctgtttatttacacgtg

SEQ ID NO: 1508 - DNA, 44 bp, synthetic construct
  misc_feature 1..44: note = oligonucleotide decoy
  source 1..44: mol_type = other DNA
aaaatggctccaccggtgttacgtcacctgtttgtttacacgtg

SEQ ID NO: 1509 - DNA, 44 bp, synthetic construct
  misc_feature 1..44: note = oligonucleotide decoy
  source 1..44: mol_type = other DNA
aaaatggctccaccggtgttatatcacctgtttatttacacgtg

SEQ ID NO: 1510 - DNA, 44 bp, synthetic construct
  misc_feature 1..44: note = oligonucleotide decoy
  source 1..44: mol_type = other DNA
aaaatggctccaccggtgttatatcacctgtttgtttacacgtg

SEQ ID NO: 1511 - DNA, 44 bp, synthetic construct
  misc_feature 1..44: note = oligonucleotide decoy
  source 1..44: mol_type = other DNA
aaaatggctccaccggtgttatgtcacctgtttatttacacgtg

SEQ ID NO: 1512 - DNA, 44 bp, synthetic construct
  misc_feature 1..44: note = oligonucleotide decoy
  source 1..44: mol_type = other DNA
aaaatggctccaccggtgttatgtcacctgtttgtttacacgtg

SEQ ID NO: 1513 - DNA, 44 bp, synthetic construct
  misc_feature 1..44: note = oligonucleotide decoy
  source 1..44: mol_type = other DNA
aaaatggctccaccgttgttacatcacctgtttatttacacgtg

SEQ ID NO: 1514 - DNA, 44 bp, synthetic construct
  misc_feature 1..44: note = oligonucleotide decoy
  source 1..44: mol_type = other DNA
aaaatggctccaccgttgttacatcacctgtttgtttacacgtg

SEQ ID NO: 1515 - DNA, 44 bp, synthetic construct
  misc_feature 1..44: note = oligonucleotide decoy
  source 1..44: mol_type = other DNA
aaaatggctccaccgttgttacgtcacctgtttatttacacgtg

SEQ ID NO: 1516 - DNA, 44 bp, synthetic construct
  misc_feature 1..44: note = oligonucleotide decoy
  source 1..44: mol_type = other DNA
aaaatggctccaccgttgttacgtcacctgtttgtttacacgtg

SEQ ID NO: 1517 - DNA, 44 bp, synthetic construct
  misc_feature 1..44: note = oligonucleotide decoy
  source 1..44: mol_type = other DNA
aaaatggctccaccgttgttatatcacctgtttatttacacgtg

SEQ ID NO: 1518 - DNA, 44 bp, synthetic construct
  misc_feature 1..44: note = oligonucleotide decoy
  source 1..44: mol_type = other DNA
aaaatggctccaccgttgttatatcacctgtttgtttacacgtg

SEQ ID NO: 1519 - DNA, 44 bp, synthetic construct
  misc_feature 1..44: note = oligonucleotide decoy
  source 1..44: mol_type = other DNA
aaaatggctccaccgttgttatgtcacctgtttatttacacgtg

SEQ ID NO: 1520 - DNA, 44 bp, synthetic construct
  misc_feature 1..44: note = oligonucleotide decoy
  source 1..44: mol_type = other DNA
aaaatggctccaccgttgttatgtcacctgtttgtttacacgtg

SEQ ID NO: 1521 - DNA, 44 bp, synthetic construct
  misc_feature 1..44: note = oligonucleotide decoy
  source 1..44: mol_type = other DNA
aagatggctccatcgatgacataacaggtgtttatttacacgtg

SEQ ID NO: 1522 - DNA, 44 bp, synthetic construct
  misc_feature 1..44: note = oligonucleotide decoy
  source 1..44: mol_type = other DNA
aagatggctccatcgatgacataacaggtgtttgtttacacgtg

SEQ ID NO: 1523 - DNA, 44 bp, synthetic construct
  misc_feature 1..44: note = oligonucleotide decoy
  source 1..44: mol_type = other DNA
aagatggctccatcgatgacgtaacaggtgtttatttacacgtg

SEQ ID NO: 1524 - DNA, 44 bp, synthetic construct
  misc_feature 1..44: note = oligonucleotide decoy
  source 1..44: mol_type = other DNA
aagatggctccatcgatgacgtaacaggtgtttgtttacacgtg

SEQ ID NO: 1525 - DNA, 44 bp, synthetic construct
  misc_feature 1..44: note = oligonucleotide decoy
  source 1..44: mol_type = other DNA
aagatggctccatcgatgatataacaggtgtttatttacacgtg

SEQ ID NO: 1526 - DNA, 44 bp, synthetic construct
  misc_feature 1..44: note = oligonucleotide decoy
  source 1..44: mol_type = other DNA
aagatggctccatcgatgatataacaggtgtttgtttacacgtg

SEQ ID NO: 1527 - DNA, 44 bp, synthetic construct
  misc_feature 1..44: note = oligonucleotide decoy
  source 1..44: mol_type = other DNA
aagatggctccatcgatgatgtaacaggtgtttatttacacgtg

SEQ ID NO: 1528 - DNA, 44 bp, synthetic construct
  misc_feature 1..44: note = oligonucleotide decoy
  source 1..44: mol_type = other DNA
aagatggctccatcgatgatgtaacaggtgtttgtttacacgtg

SEQ ID NO: 1529 - DNA, 44 bp, synthetic construct
  misc_feature 1..44: note = oligonucleotide decoy
  source 1..44: mol_type = other DNA
aagatggctccatcggtgacataacaggtgtttatttacacgtg

SEQ ID NO: 1530 - DNA, 44 bp, synthetic construct
  misc_feature 1..44: note = oligonucleotide decoy
  source 1..44: mol_type = other DNA
aagatggctccatcggtgacataacaggtgtttgtttacacgtg

SEQ ID NO: 1531 - DNA, 44 bp, synthetic construct
  misc_feature 1..44: note = oligonucleotide decoy
  source 1..44: mol_type = other DNA
aagatggctccatcggtgacgtaacaggtgtttatttacacgtg

SEQ ID NO: 1532 - DNA, 44 bp, synthetic construct
  misc_feature 1..44: note = oligonucleotide decoy
  source 1..44: mol_type = other DNA
aagatggctccatcggtgacgtaacaggtgtttgtttacacgtg

SEQ ID NO: 1533 - DNA, 44 bp, synthetic construct
  misc_feature 1..44: note = oligonucleotide decoy
  source 1..44: mol_type = other DNA
aagatggctccatcggtgatataacaggtgtttatttacacgtg

SEQ ID NO: 1534 - DNA, 44 bp, synthetic construct
  misc_feature 1..44: note = oligonucleotide decoy
  source 1..44: mol_type = other DNA
aagatggctccatcggtgatataacaggtgtttgtttacacgtg

SEQ ID NO: 1535 - DNA, 44 bp, synthetic construct
  misc_feature 1..44: note = oligonucleotide decoy
  source 1..44: mol_type = other DNA
aagatggctccatcggtgatgtaacaggtgtttatttacacgtg

SEQ ID NO: 1536 - DNA, 44 bp, synthetic construct
  misc_feature 1..44: note = oligonucleotide decoy
  source 1..44: mol_type = other DNA
aagatggctccatcggtgatgtaacaggtgtttgtttacacgtg

SEQ ID NO: 1537 - DNA, 44 bp, synthetic construct
  misc_feature 1..44: note = oligonucleotide decoy
  source 1..44: mol_type = other DNA
aaaatggctccatcgatgacataacaggtgtttatttacacgtg

SEQ ID NO: 1538 - DNA, 44 bp, synthetic construct
  misc_feature 1..44: note = oligonucleotide decoy
  source 1..44: mol_type = other DNA
aaaatggctccatcgatgacataacaggtgtttgtttacacgtg

SEQ ID NO: 1539 - DNA, 44 bp, synthetic construct
  misc_feature 1..44: note = oligonucleotide decoy
  source 1..44: mol_type = other DNA
aaaatggctccatcgatgacgtaacaggtgtttatttacacgtg

SEQ ID NO: 1540 - DNA, 44 bp, synthetic construct
  misc_feature 1..44: note = oligonucleotide decoy
  source 1..44: mol_type = other DNA
aaaatggctccatcgatgacgtaacaggtgtttgtttacacgtg

SEQ ID NO: 1541 - DNA, 44 bp, synthetic construct
  misc_feature 1..44: note = oligonucleotide decoy
  source 1..44: mol_type = other DNA
aaaatggctccatcgatgatataacaggtgtttatttacacgtg

SEQ ID NO: 1542 - DNA, 44 bp, synthetic construct
  misc_feature 1..44: note = oligonucleotide decoy
  source 1..44: mol_type = other DNA
aaaatggctccatcgatgatataacaggtgtttgtttacacgtg

SEQ ID NO: 1543 - DNA, 44 bp, synthetic construct
  misc_feature 1..44: note = oligonucleotide decoy
  source 1..44: mol_type = other DNA
aaaatggctccatcgatgatgtaacaggtgtttatttacacgtg

SEQ ID NO: 1544 - DNA, 44 bp, synthetic construct
  misc_feature 1..44: note = oligonucleotide decoy
  source 1..44: mol_type = other DNA
aaaatggctccatcgatgatgtaacaggtgtttgtttacacgtg

SEQ ID NO: 1545 - DNA, 44 bp, synthetic construct
  misc_feature 1..44: note = oligonucleotide decoy
  source 1..44: mol_type = other DNA
aaaatggctccatcggtgacataacaggtgtttatttacacgtg

SEQ ID NO: 1546 - DNA, 44 bp, synthetic construct
  misc_feature 1..44: note = oligonucleotide decoy
  source 1..44: mol_type = other DNA
aaaatggctccatcggtgacataacaggtgtttgtttacacgtg

SEQ ID NO: 1547 - DNA, 44 bp, synthetic construct
  misc_feature 1..44: note = oligonucleotide decoy
  source 1..44: mol_type = other DNA
aaaatggctccatcggtgacgtaacaggtgtttatttacacgtg

SEQ ID NO: 1548 - DNA, 44 bp, synthetic construct
  misc_feature 1..44: note = oligonucleotide decoy
  source 1..44: mol_type = other DNA
aaaatggctccatcggtgacgtaacaggtgtttgtttacacgtg

SEQ ID NO: 1549 - DNA, 44 bp, synthetic construct
  misc_feature 1..44: note = oligonucleotide decoy
  source 1..44: mol_type = other DNA
aaaatggctccatcggtgatataacaggtgtttatttacacgtg

SEQ ID NO: 1550 - DNA, 44 bp, synthetic construct
  misc_feature 1..44: note = oligonucleotide decoy
  source 1..44: mol_type = other DNA
aaaatggctccatcggtgatataacaggtgtttgtttacacgtg

SEQ ID NO: 1551 - DNA, 44 bp, synthetic construct
  misc_feature 1..44: note = oligonucleotide decoy
  source 1..44: mol_type = other DNA
aaaatggctccatcggtgatgtaacaggtgtttatttacacgtg

SEQ ID NO: 1552 - DNA, 44 bp, synthetic construct
  misc_feature 1..44: note = oligonucleotide decoy
  source 1..44: mol_type = other DNA
aaaatggctccatcggtgatgtaacaggtgtttgtttacacgtg

SEQ ID NO: 1553 - DNA, 44 bp, synthetic construct
  misc_feature 1..44: note = oligonucleotide decoy
  source 1..44: mol_type = other DNA
aagatggctccaccgatgacataacaggtgtttatttacacgtg

SEQ ID NO: 1554 - DNA, 44 bp, synthetic construct
  misc_feature 1..44: note = oligonucleotide decoy
  source 1..44: mol_type = other DNA
aagatggctccaccgatgacataacaggtgtttgtttacacgtg

SEQ ID NO: 1555 - DNA, 44 bp, synthetic construct
  misc_feature 1..44: note = oligonucleotide decoy
  source 1..44: mol_type = other DNA
aagatggctccaccgatgacgtaacaggtgtttatttacacgtg

SEQ ID NO: 1556 - DNA, 44 bp, synthetic construct
  misc_feature 1..44: note = oligonucleotide decoy
  source 1..44: mol_type = other DNA
aagatggctccaccgatgacgtaacaggtgtttgtttacacgtg

SEQ ID NO: 1557 - DNA, 44 bp, synthetic construct
  misc_feature 1..44: note = oligonucleotide decoy
  source 1..44: mol_type = other DNA
aagatggctccaccgatgatataacaggtgtttatttacacgtg

SEQ ID NO: 1558 - DNA, 44 bp, synthetic construct
  misc_feature 1..44: note = oligonucleotide decoy
  source 1..44: mol_type = other DNA
aagatggctccaccgatgatataacaggtgtttgtttacacgtg

SEQ ID NO: 1559 - DNA, 44 bp, synthetic construct
  misc_feature 1..44: note = oligonucleotide decoy
  source 1..44: mol_type = other DNA
aagatggctccaccgatgatgtaacaggtgtttatttacacgtg

SEQ ID NO: 1560 - DNA, 44 bp, synthetic construct
  misc_feature 1..44: note = oligonucleotide decoy
  source 1..44: mol_type = other DNA
aagatggctccaccgatgatgtaacaggtgtttgtttacacgtg

SEQ ID NO: 1561 - DNA, 44 bp, synthetic construct
  misc_feature 1..44: note = oligonucleotide decoy
  source 1..44: mol_type = other DNA
aagatggctccaccggtgacataacaggtgtttatttacacgtg

SEQ ID NO: 1562 - DNA, 44 bp, synthetic construct
  misc_feature 1..44: note = oligonucleotide decoy
  source 1..44: mol_type = other DNA
aagatggctccaccggtgacataacaggtgtttgtttacacgtg

SEQ ID NO: 1563 - DNA, 44 bp, synthetic construct
  misc_feature 1..44: note = oligonucleotide decoy
  source 1..44: mol_type = other DNA
aagatggctccaccggtgacgtaacaggtgtttatttacacgtg

SEQ ID NO: 1564 - DNA, 44 bp, synthetic construct
  misc_feature 1..44: note = oligonucleotide decoy
  source 1..44: mol_type = other DNA
aagatggctccaccggtgacgtaacaggtgtttgtttacacgtg

SEQ ID NO: 1565 - DNA, 44 bp, synthetic construct
  misc_feature 1..44: note = oligonucleotide decoy
  source 1..44: mol_type = other DNA
aagatggctccaccggtgatataacaggtgtttatttacacgtg

SEQ ID NO: 1566 - DNA, 44 bp, synthetic construct
  misc_feature 1..44: note = oligonucleotide decoy
  source 1..44: mol_type = other DNA
aagatggctccaccggtgatataacaggtgtttgtttacacgtg

SEQ ID NO: 1567 - DNA, 44 bp, synthetic construct
  misc_feature 1..44: note = oligonucleotide decoy
  source 1..44: mol_type = other DNA
aagatggctccaccggtgatgtaacaggtgtttatttacacgtg

SEQ ID NO: 1568 - DNA, 44 bp, synthetic construct
  misc_feature 1..44: note = oligonucleotide decoy
  source 1..44: mol_type = other DNA
aagatggctccaccggtgatgtaacaggtgtttgtttacacgtg

SEQ ID NO: 1569 - DNA, 44 bp, synthetic construct
  misc_feature 1..44: note = oligonucleotide decoy
  source 1..44: mol_type = other DNA
aaaatggctccaccgatgacataacaggtgtttatttacacgtg

SEQ ID NO: 1570 - DNA, 44 bp, synthetic construct
  misc_feature 1..44: note = oligonucleotide decoy
  source 1..44: mol_type = other DNA
aaaatggctccaccgatgacataacaggtgtttgtttacacgtg

SEQ ID NO: 1571 - DNA, 44 bp, synthetic construct
  misc_feature 1..44: note = oligonucleotide decoy
  source 1..44: mol_type = other DNA
aaaatggctccaccgatgacgtaacaggtgtttatttacacgtg

SEQ ID NO: 1572 - DNA, 44 bp, synthetic construct
  misc_feature 1..44: note = oligonucleotide decoy
  source 1..44: mol_type = other DNA
aaaatggctccaccgatgacgtaacaggtgtttgtttacacgtg

SEQ ID NO: 1573 - DNA, 44 bp, synthetic construct
  misc_feature 1..44: note = oligonucleotide decoy
  source 1..44: mol_type = other DNA
aaaatggctccaccgatgatataacaggtgtttatttacacgtg

SEQ ID NO: 1574 - DNA, 44 bp, synthetic construct
  misc_feature 1..44: note = oligonucleotide decoy
  source 1..44: mol_type = other DNA
aaaatggctccaccgatgatataacaggtgtttgtttacacgtg

SEQ ID NO: 1575 - DNA, 44 bp, synthetic construct
  misc_feature 1..44: note = oligonucleotide decoy
  source 1..44: mol_type = other DNA
aaaatggctccaccgatgatgtaacaggtgtttatttacacgtg

SEQ ID NO: 1576 - DNA, 44 bp, synthetic construct
  misc_feature 1..44: note = oligonucleotide decoy
  source 1..44: mol_type = other DNA
aaaatggctccaccgatgatgtaacaggtgtttgtttacacgtg

SEQ ID NO: 1577 - DNA, 44 bp, synthetic construct
  misc_feature 1..44: note = oligonucleotide decoy
  source 1..44: mol_type = other DNA
aaaatggctccaccggtgacataacaggtgtttatttacacgtg

SEQ ID NO: 1578 - DNA, 44 bp, synthetic construct
  misc_feature 1..44: note = oligonucleotide decoy
  source 1..44: mol_type = other DNA
aaaatggctccaccggtgacataacaggtgtttgtttacacgtg

SEQ ID NO: 1579 - DNA, 44 bp, synthetic construct
  misc_feature 1..44: note = oligonucleotide decoy
  source 1..44: mol_type = other DNA
aaaatggctccaccggtgacgtaacaggtgtttatttacacgtg

SEQ ID NO: 1580 - DNA, 44 bp, synthetic construct
  misc_feature 1..44: note = oligonucleotide decoy
  source 1..44: mol_type = other DNA
aaaatggctccaccggtgacgtaacaggtgtttgtttacacgtg

SEQ ID NO: 1581 - DNA, 44 bp, synthetic construct
  misc_feature 1..44: note = oligonucleotide decoy
  source 1..44: mol_type = other DNA
aaaatggctccaccggtgatataacaggtgtttatttacacgtg

SEQ ID NO: 1582 - DNA, 44 bp, synthetic construct
  misc_feature 1..44: note = oligonucleotide decoy
  source 1..44: mol_type = other DNA
aaaatggctccaccggtgatataacaggtgtttgtttacacgtg

SEQ ID NO: 1583 - DNA, 44 bp, synthetic construct
  misc_feature 1..44: note = oligonucleotide decoy
  source 1..44: mol_type = other DNA
aaaatggctccaccggtgatgtaacaggtgtttatttacacgtg

SEQ ID NO: 1584 - DNA, 44 bp, synthetic construct
  misc_feature 1..44: note = oligonucleotide decoy
  source 1..44: mol_type = other DNA
aaaatggctccaccggtgatgtaacaggtgtttgtttacacgtg

SEQ ID NO: 1585 - DNA, 44 bp, synthetic construct
  misc_feature 1..44: note = oligonucleotide decoy
  source 1..44: mol_type = other DNA
aagatggctccatcgatgacataacacgtgtaaacaaacacctg

SEQ ID NO: 1586 - DNA, 44 bp, synthetic construct
  misc_feature 1..44: note = oligonucleotide decoy
  source 1..44: mol_type = other DNA
aagatggctccatcgatgacataacacgtgtaaataaacacctg

SEQ ID NO: 1587 - DNA, 44 bp, synthetic construct
  misc_feature 1..44: note = oligonucleotide decoy
  source 1..44: mol_type = other DNA
aagatggctccatcgatgacgtaacacgtgtaaacaaacacctg

SEQ ID NO: 1588 - DNA, 44 bp, synthetic construct
  misc_feature 1..44: note = oligonucleotide decoy
  source 1..44: mol_type = other DNA
aagatggctccatcgatgacgtaacacgtgtaaataaacacctg

SEQ ID NO: 1589 - DNA, 44 bp, synthetic construct
  misc_feature 1..44: note = oligonucleotide decoy
  source 1..44: mol_type = other DNA
aagatggctccatcgatgatataacacgtgtaaacaaacacctg

SEQ ID NO: 1590 - DNA, 44 bp, synthetic construct
  misc_feature 1..44: note = oligonucleotide decoy
  source 1..44: mol_type = other DNA
aagatggctccatcgatgatataacacgtgtaaataaacacctg

SEQ ID NO: 1591 - DNA, 44 bp, synthetic construct
  misc_feature 1..44: note = oligonucleotide decoy
  source 1..44: mol_type = other DNA
aagatggctccatcgatgatgtaacacgtgtaaacaaacacctg

SEQ ID NO: 1592 - DNA, 44 bp, synthetic construct
  misc_feature 1..44: note = oligonucleotide decoy
  source 1..44: mol_type = other DNA
aagatggctccatcgatgatgtaacacgtgtaaataaacacctg

SEQ ID NO: 1593 - DNA, 44 bp, synthetic construct
  misc_feature 1..44: note = oligonucleotide decoy
  source 1..44: mol_type = other DNA
aagatggctccatcggtgacataacacgtgtaaacaaacacctg

SEQ ID NO: 1594 - DNA, 44 bp, synthetic construct
  misc_feature 1..44: note = oligonucleotide decoy
  source 1..44: mol_type = other DNA
aagatggctccatcggtgacataacacgtgtaaataaacacctg

SEQ ID NO: 1595 - DNA, 44 bp, synthetic construct
  misc_feature 1..44: note = oligonucleotide decoy
  source 1..44: mol_type = other DNA
aagatggctccatcggtgacgtaacacgtgtaaacaaacacctg

SEQ ID NO: 1596 - DNA, 44 bp, synthetic construct
  misc_feature 1..44: note = oligonucleotide decoy
  source 1..44: mol_type = other DNA
aagatggctccatcggtgacgtaacacgtgtaaataaacacctg

SEQ ID NO: 1597 - DNA, 44 bp, synthetic construct
  misc_feature 1..44: note = oligonucleotide decoy
  source 1..44: mol_type = other DNA
aagatggctccatcggtgatataacacgtgtaaacaaacacctg

SEQ ID NO: 1598 - DNA, 44 bp, synthetic construct
  misc_feature 1..44: note = oligonucleotide decoy
  source 1..44: mol_type = other DNA
aagatggctccatcggtgatataacacgtgtaaataaacacctg

SEQ ID NO: 1599 - DNA, 44 bp, synthetic construct
  misc_feature 1..44: note = oligonucleotide decoy
  source 1..44: mol_type = other DNA
aagatggctccatcggtgatgtaacacgtgtaaacaaacacctg

SEQ ID NO: 1600 - DNA, 44 bp, synthetic construct
  misc_feature 1..44: note = oligonucleotide decoy
  source 1..44: mol_type = other DNA
aagatggctccatcggtgatgtaacacgtgtaaataaacacctg

SEQ ID NO: 1601 - DNA, 44 bp, synthetic construct
  misc_feature 1..44: note = oligonucleotide decoy
  source 1..44: mol_type = other DNA
aaaatggctccatcgatgacataacacgtgtaaacaaacacctg

SEQ ID NO: 1602 - DNA, 44 bp, synthetic construct
  misc_feature 1..44: note = oligonucleotide decoy
  source 1..44: mol_type = other DNA
aaaatggctccatcgatgacataacacgtgtaaataaacacctg

SEQ ID NO: 1603 - DNA, 44 bp, synthetic construct
  misc_feature 1..44: note = oligonucleotide decoy
  source 1..44: mol_type = other DNA
aaaatggctccatcgatgacgtaacacgtgtaaacaaacacctg

SEQ ID NO: 1604 - DNA, 44 bp, synthetic construct
  misc_feature 1..44: note = oligonucleotide decoy
  source 1..44: mol_type = other DNA
aaaatggctccatcgatgacgtaacacgtgtaaataaacacctg

SEQ ID NO: 1605 - DNA, 44 bp, synthetic construct
  misc_feature 1..44: note = oligonucleotide decoy
  source 1..44: mol_type = other DNA
aaaatggctccatcgatgatataacacgtgtaaacaaacacctg

SEQ ID NO: 1606 - DNA, 44 bp, synthetic construct
  misc_feature 1..44: note = oligonucleotide decoy
  source 1..44: mol_type = other DNA
aaaatggctccatcgatgatataacacgtgtaaataaacacctg

SEQ ID NO: 1607 - DNA, 44 bp, synthetic construct
  misc_feature 1..44: note = oligonucleotide decoy
  source 1..44: mol_type = other DNA
aaaatggctccatcgatgatgtaacacgtgtaaacaaacacctg

SEQ ID NO: 1608 - DNA, 44 bp, synthetic construct
  misc_feature 1..44: note = oligonucleotide decoy
  source 1..44: mol_type = other DNA
aaaatggctccatcgatgatgtaacacgtgtaaataaacacctg

SEQ ID NO: 1609 - DNA, 44 bp, synthetic construct
  misc_feature 1..44: note = oligonucleotide decoy
  source 1..44: mol_type = other DNA
aaaatggctccatcggtgacataacacgtgtaaacaaacacctg

SEQ ID NO: 1610 - DNA, 44 bp, synthetic construct
  misc_feature 1..44: note = oligonucleotide decoy
  source 1..44: mol_type = other DNA
aaaatggctccatcggtgacataacacgtgtaaataaacacctg

SEQ ID NO: 1611 - DNA, 44 bp, synthetic construct
  misc_feature 1..44: note = oligonucleotide decoy
  source 1..44: mol_type = other DNA
aaaatggctccatcggtgacgtaacacgtgtaaacaaacacctg

SEQ ID NO: 1612 - DNA, 44 bp, synthetic construct
  misc_feature 1..44: note = oligonucleotide decoy
  source 1..44: mol_type = other DNA
aaaatggctccatcggtgacgtaacacgtgtaaataaacacctg

SEQ ID NO: 1613 - DNA, 44 bp, synthetic construct
  misc_feature 1..44: note = oligonucleotide decoy
  source 1..44: mol_type = other DNA
aaaatggctccatcggtgatataacacgtgtaaacaaacacctg

SEQ ID NO: 1614 - DNA, 44 bp, synthetic construct
  misc_feature 1..44: note = oligonucleotide decoy
  source 1..44: mol_type = other DNA
aaaatggctccatcggtgatataacacgtgtaaataaacacctg

SEQ ID NO: 1615 - DNA, 44 bp, synthetic construct
  misc_feature 1..44: note = oligonucleotide decoy
  source 1..44: mol_type = other DNA
aaaatggctccatcggtgatgtaacacgtgtaaacaaacacctg

SEQ ID NO: 1616 - DNA, 44 bp, synthetic construct
  misc_feature 1..44: note = oligonucleotide decoy
  source 1..44: mol_type = other DNA
aaaatggctccatcggtgatgtaacacgtgtaaataaacacctg

SEQ ID NO: 1617 - DNA, 44 bp, synthetic construct
  misc_feature 1..44: note = oligonucleotide decoy
  source 1..44: mol_type = other DNA
aagatggctccaccgatgacataacacgtgtaaacaaacacctg

SEQ ID NO: 1618 - DNA, 44 bp, synthetic construct
  misc_feature 1..44: note = oligonucleotide decoy
  source 1..44: mol_type = other DNA
aagatggctccaccgatgacataacacgtgtaaataaacacctg

SEQ ID NO: 1619 - DNA, 44 bp, synthetic construct
  misc_feature 1..44: note = oligonucleotide decoy
  source 1..44: mol_type = other DNA
aagatggctccaccgatgacgtaacacgtgtaaacaaacacctg

SEQ ID NO: 1620 - DNA, 44 bp, synthetic construct
  misc_feature 1..44: note = oligonucleotide decoy
  source 1..44: mol_type = other DNA
aagatggctccaccgatgacgtaacacgtgtaaataaacacctg

SEQ ID NO: 1621 - DNA, 44 bp, synthetic construct
  misc_feature 1..44: note = oligonucleotide decoy
  source 1..44: mol_type = other DNA
aagatggctccaccgatgatataacacgtgtaaacaaacacctg

SEQ ID NO: 1622 - DNA, 44 bp, synthetic construct
  misc_feature 1..44: note = oligonucleotide decoy
  source 1..44: mol_type = other DNA
aagatggctccaccgatgatataacacgtgtaaataaacacctg

SEQ ID NO: 1623 - DNA, 44 bp, synthetic construct
  misc_feature 1..44: note = oligonucleotide decoy
  source 1..44: mol_type = other DNA
aagatggctccaccgatgatgtaacacgtgtaaacaaacacctg

SEQ ID NO: 1624 - DNA, 44 bp, synthetic construct
  misc_feature 1..44: note = oligonucleotide decoy
  source 1..44: mol_type = other DNA
aagatggctccaccgatgatgtaacacgtgtaaataaacacctg

SEQ ID NO: 1625 - DNA, 44 bp, synthetic construct
  misc_feature 1..44: note = oligonucleotide decoy
  source 1..44: mol_type = other DNA
aagatggctccaccggtgacataacacgtgtaaacaaacacctg

SEQ ID NO: 1626 - DNA, 44 bp, synthetic construct
  misc_feature 1..44: note = oligonucleotide decoy
  source 1..44: mol_type = other DNA
aagatggctccaccggtgacataacacgtgtaaataaacacctg

SEQ ID NO: 1627 - DNA, 44 bp, synthetic construct
  misc_feature 1..44: note = oligonucleotide decoy
  source 1..44: mol_type = other DNA
aagatggctccaccggtgacgtaacacgtgtaaacaaacacctg

SEQ ID NO: 1628 - DNA, 44 bp, synthetic construct
  misc_feature 1..44: note = oligonucleotide decoy
  source 1..44: mol_type = other DNA
aagatggctccaccggtgacgtaacacgtgtaaataaacacctg

SEQ ID NO: 1629 - DNA, 44 bp, synthetic construct
  misc_feature 1..44: note = oligonucleotide decoy
  source 1..44: mol_type = other DNA
aagatggctccaccggtgatataacacgtgtaaacaaacacctg

SEQ ID NO: 1630 - DNA, 44 bp, synthetic construct
  misc_feature 1..44: note = oligonucleotide decoy
  source 1..44: mol_type = other DNA
aagatggctccaccggtgatataacacgtgtaaataaacacctg

SEQ ID NO: 1631 - DNA, 44 bp, synthetic construct
  misc_feature 1..44: note = oligonucleotide decoy
  source 1..44: mol_type = other DNA
aagatggctccaccggtgatgtaacacgtgtaaacaaacacctg

SEQ ID NO: 1632 - DNA, 44 bp, synthetic construct
  misc_feature 1..44: note = oligonucleotide decoy
  source 1..44: mol_type = other DNA
aagatggctccaccggtgatgtaacacgtgtaaataaacacctg

SEQ ID NO: 1633 - DNA, 44 bp, synthetic construct
  misc_feature 1..44: note = oligonucleotide decoy
  source 1..44: mol_type = other DNA
aaaatggctccaccgatgacataacacgtgtaaacaaacacctg

SEQ ID NO: 1634 - DNA, 44 bp, synthetic construct
  misc_feature 1..44: note = oligonucleotide decoy
  source 1..44: mol_type = other DNA
aaaatggctccaccgatgacataacacgtgtaaataaacacctg

SEQ ID NO: 1635 - DNA, 44 bp, synthetic construct
  misc_feature 1..44: note = oligonucleotide decoy
  source 1..44: mol_type = other DNA
aaaatggctccaccgatgacgtaacacgtgtaaacaaacacctg

SEQ ID NO: 1636 - DNA, 44 bp, synthetic construct
  misc_feature 1..44: note = oligonucleotide decoy
  source 1..44: mol_type = other DNA
aaaatggctccaccgatgacgtaacacgtgtaaataaacacctg

SEQ ID NO: 1637 - DNA, 44 bp, synthetic construct
  misc_feature 1..44: note = oligonucleotide decoy
  source 1..44: mol_type = other DNA
aaaatggctccaccgatgatataacacgtgtaaacaaacacctg

SEQ ID NO: 1638 - DNA, 44 bp, synthetic construct
  misc_feature 1..44: note = oligonucleotide decoy
  source 1..44: mol_type = other DNA
aaaatggctccaccgatgatataacacgtgtaaataaacacctg

SEQ ID NO: 1639 - DNA, 44 bp, synthetic construct
  misc_feature 1..44: note = oligonucleotide decoy
  source 1..44: mol_type = other DNA
aaaatggctccaccgatgatgtaacacgtgtaaacaaacacctg

SEQ ID NO: 1640 - DNA, 44 bp, synthetic construct
  misc_feature 1..44: note = oligonucleotide decoy
  source 1..44: mol_type = other DNA
aaaatggctccaccgatgatgtaacacgtgtaaataaacacctg

SEQ ID NO: 1641 - DNA, 44 bp, synthetic construct
  misc_feature 1..44: note = oligonucleotide decoy
  source 1..44: mol_type = other DNA
aaaatggctccaccggtgacataacacgtgtaaacaaacacctg

SEQ ID NO: 1642 - DNA, 44 bp, synthetic construct
  misc_feature 1..44: note = oligonucleotide decoy
  source 1..44: mol_type = other DNA
aaaatggctccaccggtgacataacacgtgtaaataaacacctg

SEQ ID NO: 1643 - DNA, 44 bp, synthetic construct
  misc_feature 1..44: note = oligonucleotide decoy
  source 1..44: mol_type = other DNA
aaaatggctccaccggtgacgtaacacgtgtaaacaaacacctg

SEQ ID NO: 1644 - DNA, 44 bp, synthetic construct
  misc_feature 1..44: note = oligonucleotide decoy
  source 1..44: mol_type = other DNA
aaaatggctccaccggtgacgtaacacgtgtaaataaacacctg

SEQ ID NO: 1645 - DNA, 44 bp, synthetic construct
  misc_feature 1..44: note = oligonucleotide decoy
  source 1..44: mol_type = other DNA
aaaatggctccaccggtgatataacacgtgtaaacaaacacctg

SEQ ID NO: 1646 - DNA, 44 bp, synthetic construct
  misc_feature 1..44: note = oligonucleotide decoy
  source 1..44: mol_type = other DNA
aaaatggctccaccggtgatataacacgtgtaaataaacacctg

SEQ ID NO: 1647 - DNA, 44 bp, synthetic construct
  misc_feature 1..44: note = oligonucleotide decoy
  source 1..44: mol_type = other DNA
aaaatggctccaccggtgatgtaacacgtgtaaacaaacacctg

SEQ ID NO: 1648 - DNA, 44 bp, synthetic construct
  misc_feature 1..44: note = oligonucleotide decoy
  source 1..44: mol_type = other DNA
aaaatggctccaccggtgatgtaacacgtgtaaataaacacctg

SEQ ID NO: 1649 - DNA, 44 bp, synthetic construct
  misc_feature 1..44: note = oligonucleotide decoy
  source 1..44: mol_type = other DNA
aagatggctccatcgatgttacatcacgtgtaaacaaacacctg

SEQ ID NO: 1650 - DNA, 44 bp, synthetic construct
  misc_feature 1..44: note = oligonucleotide decoy
  source 1..44: mol_type = other DNA
aagatggctccatcgatgttacatcacgtgtaaataaacacctg

SEQ ID NO: 1651 - DNA, 44 bp, synthetic construct
  misc_feature 1..44: note = oligonucleotide decoy
  source 1..44: mol_type = other DNA
aagatggctccatcgatgttacgtcacgtgtaaacaaacacctg

SEQ ID NO: 1652 - DNA, 44 bp, synthetic construct
  misc_feature 1..44: note = oligonucleotide decoy
  source 1..44: mol_type = other DNA
aagatggctccatcgatgttacgtcacgtgtaaataaacacctg

SEQ ID NO: 1653 - DNA, 44 bp, synthetic construct
  misc_feature 1..44: note = oligonucleotide decoy
  source 1..44: mol_type = other DNA
aagatggctccatcgatgttatatcacgtgtaaacaaacacctg

SEQ ID NO: 1654 - DNA, 44 bp, synthetic construct
  misc_feature 1..44: note = oligonucleotide decoy
  source 1..44: mol_type = other DNA
aagatggctccatcgatgttatatcacgtgtaaataaacacctg

SEQ ID NO: 1655 - DNA, 44 bp, synthetic construct
  misc_feature 1..44: note = oligonucleotide decoy
  source 1..44: mol_type = other DNA
aagatggctccatcgatgttatgtcacgtgtaaacaaacacctg

SEQ ID NO: 1656 - DNA, 44 bp, synthetic construct
  misc_feature 1..44: note = oligonucleotide decoy
  source 1..44: mol_type = other DNA
aagatggctccatcgatgttatgtcacgtgtaaataaacacctg

SEQ ID NO: 1657 - DNA, 44 bp, synthetic construct
  misc_feature 1..44: note = oligonucleotide decoy
  source 1..44: mol_type = other DNA
aagatggctccatcgctgttacatcacgtgtaaacaaacacctg

SEQ ID NO: 1658 - DNA, 44 bp, synthetic construct
  misc_feature 1..44: note = oligonucleotide decoy
  source 1..44: mol_type = other DNA
aagatggctccatcgctgttacatcacgtgtaaataaacacctg

SEQ ID NO: 1659 - DNA, 44 bp, synthetic construct
  misc_feature 1..44: note = oligonucleotide decoy
  source 1..44: mol_type = other DNA
aagatggctccatcgctgttacgtcacgtgtaaacaaacacctg

SEQ ID NO: 1660 - DNA, 44 bp, synthetic construct
  misc_feature 1..44: note = oligonucleotide decoy
  source 1..44: mol_type = other DNA
aagatggctccatcgctgttacgtcacgtgtaaataaacacctg

SEQ ID NO: 1661 - DNA, 44 bp, synthetic construct
  misc_feature 1..44: note = oligonucleotide decoy
  source 1..44: mol_type = other DNA
aagatggctccatcgctgttatatcacgtgtaaacaaacacctg

SEQ ID NO: 1662 - DNA, 44 bp, synthetic construct
  misc_feature 1..44: note = oligonucleotide decoy
  source 1..44: mol_type = other DNA
aagatggctccatcgctgttatatcacgtgtaaataaacacctg

SEQ ID NO: 1663 - DNA, 44 bp, synthetic construct
  misc_feature 1..44: note = oligonucleotide decoy
  source 1..44: mol_type = other DNA
aagatggctccatcgctgttatgtcacgtgtaaacaaacacctg

SEQ ID NO: 1664 - DNA, 44 bp, synthetic construct
  misc_feature 1..44: note = oligonucleotide decoy
  source 1..44: mol_type = other DNA
aagatggctccatcgctgttatgtcacgtgtaaataaacacctg

SEQ ID NO: 1665 - DNA, 44 bp, synthetic construct
  misc_feature 1..44: note = oligonucleotide decoy
  source 1..44: mol_type = other DNA
aagatggctccatcggtgttacatcacgtgtaaacaaacacctg

SEQ ID NO: 1666 - DNA, 44 bp, synthetic construct
  misc_feature 1..44: note = oligonucleotide decoy
  source 1..44: mol_type = other DNA
aagatggctccatcggtgttacatcacgtgtaaataaacacctg

SEQ ID NO: 1667 - DNA, 44 bp, synthetic construct
  misc_feature 1..44: note = oligonucleotide decoy
  source 1..44: mol_type = other DNA
aagatggctccatcggtgttacgtcacgtgtaaacaaacacctg

SEQ ID NO: 1668 - DNA, 44 bp, synthetic construct
  misc_feature 1..44: note = oligonucleotide decoy
  source 1..44: mol_type = other DNA
aagatggctccatcggtgttacgtcacgtgtaaataaacacctg

SEQ ID NO: 1669 - DNA, 44 bp, synthetic construct
  misc_feature 1..44: note = oligonucleotide decoy
  source 1..44: mol_type = other DNA
aagatggctccatcggtgttatatcacgtgtaaacaaacacctg

SEQ ID NO: 1670 - DNA, 44 bp, synthetic construct
  misc_feature 1..44: note = oligonucleotide decoy
  source 1..44: mol_type = other DNA
aagatggctccatcggtgttatatcacgtgtaaataaacacctg

SEQ ID NO: 1671 - DNA, 44 bp, synthetic construct
  misc_feature 1..44: note = oligonucleotide decoy
  source 1..44: mol_type = other DNA
aagatggctccatcggtgttatgtcacgtgtaaacaaacacctg

SEQ ID NO: 1672 - DNA, 44 bp, synthetic construct
  misc_feature 1..44: note = oligonucleotide decoy
  source 1..44: mol_type = other DNA
aagatggctccatcggtgttatgtcacgtgtaaataaacacctg

SEQ ID NO: 1673 - DNA, 44 bp, synthetic construct
  misc_feature 1..44: note = oligonucleotide decoy
  source 1..44: mol_type = other DNA
aagatggctccatcgttgttacatcacgtgtaaacaaacacctg

SEQ ID NO: 1674 - DNA, 44 bp, synthetic construct
  misc_feature 1..44: note = oligonucleotide decoy
  source 1..44: mol_type = other DNA
aagatggctccatcgttgttacatcacgtgtaaataaacacctg

SEQ ID NO: 1675 - DNA, 44 bp, synthetic construct
  misc_feature 1..44: note = oligonucleotide decoy
  source 1..44: mol_type = other DNA
aagatggctccatcgttgttacgtcacgtgtaaacaaacacctg

SEQ ID NO: 1676 - DNA, 44 bp, synthetic construct
  misc_feature 1..44: note = oligonucleotide decoy
  source 1..44: mol_type = other DNA
aagatggctccatcgttgttacgtcacgtgtaaataaacacctg

SEQ ID NO: 1677 - DNA, 44 bp, synthetic construct
  misc_feature 1..44: note = oligonucleotide decoy
  source 1..44: mol_type = other DNA
aagatggctccatcgttgttatatcacgtgtaaacaaacacctg

SEQ ID NO: 1678 - DNA, 44 bp, synthetic construct
  misc_feature 1..44: note = oligonucleotide decoy
  source 1..44: mol_type = other DNA
aagatggctccatcgttgttatatcacgtgtaaataaacacctg

SEQ ID NO: 1679 - DNA, 44 bp, synthetic construct
  misc_feature 1..44: note = oligonucleotide decoy
  source 1..44: mol_type = other DNA
aagatggctccatcgttgttatgtcacgtgtaaacaaacacctg

SEQ ID NO: 1680 - DNA, 44 bp, synthetic construct
  misc_feature 1..44: note = oligonucleotide decoy
  source 1..44: mol_type = other DNA
aagatggctccatcgttgttatgtcacgtgtaaataaacacctg

SEQ ID NO: 1681 - DNA, 44 bp, synthetic construct
  misc_feature 1..44: note = oligonucleotide decoy
  source 1..44: mol_type = other DNA
aaaatggctccatcgatgttacatcacgtgtaaacaaacacctg

SEQ ID NO: 1682 - DNA, 44 bp, synthetic construct
  misc_feature 1..44: note = oligonucleotide decoy
  source 1..44: mol_type = other DNA
aaaatggctccatcgatgttacatcacgtgtaaataaacacctg

SEQ ID NO: 1683 - DNA, 44 bp, synthetic construct
  misc_feature 1..44: note = oligonucleotide decoy
  source 1..44: mol_type = other DNA
aaaatggctccatcgatgttacgtcacgtgtaaacaaacacctg

SEQ ID NO: 1684 - DNA, 44 bp, synthetic construct
  misc_feature 1..44: note = oligonucleotide decoy
  source 1..44: mol_type = other DNA
aaaatggctccatcgatgttacgtcacgtgtaaataaacacctg

SEQ ID NO: 1685 - DNA, 44 bp, synthetic construct
  misc_feature 1..44: note = oligonucleotide decoy
  source 1..44: mol_type = other DNA
aaaatggctccatcgatgttatatcacgtgtaaacaaacacctg

SEQ ID NO: 1686 - DNA, 44 bp, synthetic construct
  misc_feature 1..44: note = oligonucleotide decoy
  source 1..44: mol_type = other DNA
aaaatggctccatcgatgttatatcacgtgtaaataaacacctg

SEQ ID NO: 1687 - DNA, 44 bp, synthetic construct
  misc_feature 1..44: note = oligonucleotide decoy
  source 1..44: mol_type = other DNA
aaaatggctccatcgatgttatgtcacgtgtaaacaaacacctg

SEQ ID NO: 1688 - DNA, 44 bp, synthetic construct
  misc_feature 1..44: note = oligonucleotide decoy
  source 1..44: mol_type = other DNA
aaaatggctccatcgatgttatgtcacgtgtaaataaacacctg

SEQ ID NO: 1689 - DNA, 44 bp, synthetic construct
  misc_feature 1..44: note = oligonucleotide decoy
  source 1..44: mol_type = other DNA
aaaatggctccatcgctgttacatcacgtgtaaacaaacacctg

SEQ ID NO: 1690 - DNA, 44 bp, synthetic construct
  misc_feature 1..44: note = oligonucleotide decoy
  source 1..44: mol_type = other DNA
aaaatggctccatcgctgttacatcacgtgtaaataaacacctg

SEQ ID NO: 1691 - DNA, 44 bp, synthetic construct
  misc_feature 1..44: note = oligonucleotide decoy
  source 1..44: mol_type = other DNA
aaaatggctccatcgctgttacgtcacgtgtaaacaaacacctg

SEQ ID NO: 1692 - DNA, 44 bp, synthetic construct
  misc_feature 1..44: note = oligonucleotide decoy
  source 1..44: mol_type = other DNA
aaaatggctccatcgctgttacgtcacgtgtaaataaacacctg

SEQ ID NO: 1693 - DNA, 44 bp, synthetic construct
  misc_feature 1..44: note = oligonucleotide decoy
  source 1..44: mol_type = other DNA
aaaatggctccatcgctgttatatcacgtgtaaacaaacacctg

SEQ ID NO: 1694 - DNA, 44 bp, synthetic construct
  misc_feature 1..44: note = oligonucleotide decoy
  source 1..44: mol_type = other DNA
aaaatggctccatcgctgttatatcacgtgtaaataaacacctg

SEQ ID NO: 1695 - DNA, 44 bp, synthetic construct
  misc_feature 1..44: note = oligonucleotide decoy
  source 1..44: mol_type = other DNA
aaaatggctccatcgctgttatgtcacgtgtaaacaaacacctg

SEQ ID NO: 1696 - DNA, 44 bp, synthetic construct
  misc_feature 1..44: note = oligonucleotide decoy
  source 1..44: mol_type = other DNA
aaaatggctccatcgctgttatgtcacgtgtaaataaacacctg

SEQ ID NO: 1697 - DNA, 44 bp, synthetic construct
  misc_feature 1..44: note = oligonucleotide decoy
  source 1..44: mol_type = other DNA
aaaatggctccatcggtgttacatcacgtgtaaacaaacacctg

SEQ ID NO: 1698 - DNA, 44 bp, synthetic construct
  misc_feature 1..44: note = oligonucleotide decoy
  source 1..44: mol_type = other DNA
aaaatggctccatcggtgttacatcacgtgtaaataaacacctg

SEQ ID NO: 1699 - DNA, 44 bp, synthetic construct
  misc_feature 1..44: note = oligonucleotide decoy
  source 1..44: mol_type = other DNA
aaaatggctccatcggtgttacgtcacgtgtaaacaaacacctg

SEQ ID NO: 1700 - DNA, 44 bp, synthetic construct
  misc_feature 1..44: note = oligonucleotide decoy
  source 1..44: mol_type = other DNA
aaaatggctccatcggtgttacgtcacgtgtaaataaacacctg

SEQ ID NO: 1701 - DNA, 44 bp, synthetic construct
  misc_feature 1..44: note = oligonucleotide decoy
  source 1..44: mol_type = other DNA
aaaatggctccatcggtgttatatcacgtgtaaacaaacacctg

SEQ ID NO: 1702 - DNA, 44 bp, synthetic construct
  misc_feature 1..44: note = oligonucleotide decoy
  source 1..44: mol_type = other DNA
aaaatggctccatcggtgttatatcacgtgtaaataaacacctg

SEQ ID NO: 1703 - DNA, 44 bp, synthetic construct
  misc_feature 1..44: note = oligonucleotide decoy
  source 1..44: mol_type = other DNA
aaaatggctccatcggtgttatgtcacgtgtaaacaaacacctg

SEQ ID NO: 1704 - DNA, 44 bp, synthetic construct
  misc_feature 1..44: note = oligonucleotide decoy
  source 1..44: mol_type = other DNA
aaaatggctccatcggtgttatgtcacgtgtaaataaacacctg

SEQ ID NO: 1705 - DNA, 44 bp, synthetic construct
  misc_feature 1..44: note = oligonucleotide decoy
  source 1..44: mol_type = other DNA
aaaatggctccatcgttgttacatcacgtgtaaacaaacacctg

SEQ ID NO: 1706 - DNA, 44 bp, synthetic construct
  misc_feature 1..44: note = oligonucleotide decoy
  source 1..44: mol_type = other DNA
aaaatggctccatcgttgttacatcacgtgtaaataaacacctg

SEQ ID NO: 1707 - DNA, 44 bp, synthetic construct
  misc_feature 1..44: note = oligonucleotide decoy
  source 1..44: mol_type = other DNA
aaaatggctccatcgttgttacgtcacgtgtaaacaaacacctg

SEQ ID NO: 1708 - DNA, 44 bp, synthetic construct
  misc_feature 1..44: note = oligonucleotide decoy
  source 1..44: mol_type = other DNA
aaaatggctccatcgttgttacgtcacgtgtaaataaacacctg

SEQ ID NO: 1709 - DNA, 44 bp, synthetic construct
  misc_feature 1..44: note = oligonucleotide decoy
  source 1..44: mol_type = other DNA
aaaatggctccatcgttgttatatcacgtgtaaacaaacacctg

SEQ ID NO: 1710 - DNA, 44 bp, synthetic construct
  misc_feature 1..44: note = oligonucleotide decoy
  source 1..44: mol_type = other DNA
aaaatggctccatcgttgttatatcacgtgtaaataaacacctg

SEQ ID NO: 1711 - DNA, 44 bp, synthetic construct
  misc_feature 1..44: note = oligonucleotide decoy
  source 1..44: mol_type = other DNA
aaaatggctccatcgttgttatgtcacgtgtaaacaaacacctg

SEQ ID NO: 1712 - DNA, 44 bp, synthetic construct
  misc_feature 1..44: note = oligonucleotide decoy
  source 1..44: mol_type = other DNA
aaaatggctccatcgttgttatgtcacgtgtaaataaacacctg

SEQ ID NO: 1713 - DNA, 44 bp, synthetic construct
  misc_feature 1..44: note = oligonucleotide decoy
  source 1..44: mol_type = other DNA
aagatggctccaccgatgttacatcacgtgtaaacaaacacctg

SEQ ID NO: 1714 - DNA, 44 bp, synthetic construct
  misc_feature 1..44: note = oligonucleotide decoy
  source 1..44: mol_type = other DNA
aagatggctccaccgatgttacatcacgtgtaaataaacacctg

SEQ ID NO: 1715 - DNA, 44 bp, synthetic construct
  misc_feature 1..44: note = oligonucleotide decoy
  source 1..44: mol_type = other DNA
aagatggctccaccgatgttacgtcacgtgtaaacaaacacctg

SEQ ID NO: 1716 - DNA, 44 bp, synthetic construct
  misc_feature 1..44: note = oligonucleotide decoy
  source 1..44: mol_type = other DNA
aagatggctccaccgatgttacgtcacgtgtaaataaacacctg

SEQ ID NO: 1717 - DNA, 44 bp, synthetic construct
  misc_feature 1..44: note = oligonucleotide decoy
  source 1..44: mol_type = other DNA
aagatggctccaccgatgttatatcacgtgtaaacaaacacctg

SEQ ID NO: 1718 - DNA, 44 bp, synthetic construct
  misc_feature 1..44: note = oligonucleotide decoy
  source 1..44: mol_type = other DNA
aagatggctccaccgatgttatatcacgtgtaaataaacacctg

SEQ ID NO: 1719 - DNA, 44 bp, synthetic construct
  misc_feature 1..44: note = oligonucleotide decoy
  source 1..44: mol_type = other DNA
aagatggctccaccgatgttatgtcacgtgtaaacaaacacctg

SEQ ID NO: 1720 - DNA, 44 bp, synthetic construct
  misc_feature 1..44: note = oligonucleotide decoy
  source 1..44: mol_type = other DNA
aagatggctccaccgatgttatgtcacgtgtaaataaacacctg

SEQ ID NO: 1721 - DNA, 44 bp, synthetic construct
  misc_feature 1..44: note = oligonucleotide decoy
  source 1..44: mol_type = other DNA
aagatggctccaccgctgttacatcacgtgtaaacaaacacctg

SEQ ID NO: 1722 - DNA, 44 bp, synthetic construct
  misc_feature 1..44: note = oligonucleotide decoy
  source 1..44: mol_type = other DNA
aagatggctccaccgctgttacatcacgtgtaaataaacacctg

SEQ ID NO: 1723 - DNA, 44 bp, synthetic construct
  misc_feature 1..44: note = oligonucleotide decoy
  source 1..44: mol_type = other DNA
aagatggctccaccgctgttacgtcacgtgtaaacaaacacctg

SEQ ID NO: 1724 - DNA, 44 bp, synthetic construct
  misc_feature 1..44: note = oligonucleotide decoy
  source 1..44: mol_type = other DNA
aagatggctccaccgctgttacgtcacgtgtaaataaacacctg

SEQ ID NO: 1725 - DNA, 44 bp, synthetic construct
  misc_feature 1..44: note = oligonucleotide decoy
  source 1..44: mol_type = other DNA
aagatggctccaccgctgttatatcacgtgtaaacaaacacctg

SEQ ID NO: 1726 - DNA, 44 bp, synthetic construct
  misc_feature 1..44: note = oligonucleotide decoy
  source 1..44: mol_type = other DNA
aagatggctccaccgctgttatatcacgtgtaaataaacacctg

SEQ ID NO: 1727 - DNA, 44 bp, synthetic construct
  misc_feature 1..44: note = oligonucleotide decoy
  source 1..44: mol_type = other DNA
aagatggctccaccgctgttatgtcacgtgtaaacaaacacctg

SEQ ID NO: 1728 - DNA, 44 bp, synthetic construct
  misc_feature 1..44: note = oligonucleotide decoy
  source 1..44: mol_type = other DNA
aagatggctccaccgctgttatgtcacgtgtaaataaacacctg

SEQ ID NO: 1729 - DNA, 44 bp, synthetic construct
  misc_feature 1..44: note = oligonucleotide decoy
  source 1..44: mol_type = other DNA
aagatggctccaccggtgttacatcacgtgtaaacaaacacctg

SEQ ID NO: 1730 - DNA, 44 bp, synthetic construct
  misc_feature 1..44: note = oligonucleotide decoy
  source 1..44: mol_type = other DNA
aagatggctccaccggtgttacatcacgtgtaaataaacacctg

SEQ ID NO: 1731 - DNA, 44 bp, synthetic construct
  misc_feature 1..44: note = oligonucleotide decoy
  source 1..44: mol_type = other DNA
aagatggctccaccggtgttacgtcacgtgtaaacaaacacctg

SEQ ID NO: 1732 - DNA, 44 bp, synthetic construct
  misc_feature 1..44: note = oligonucleotide decoy
  source 1..44: mol_type = other DNA
aagatggctccaccggtgttacgtcacgtgtaaataaacacctg

SEQ ID NO: 1733 - DNA, 44 bp, synthetic construct
  misc_feature 1..44: note = oligonucleotide decoy
  source 1..44: mol_type = other DNA
aagatggctccaccggtgttatatcacgtgtaaacaaacacctg

SEQ ID NO: 1734 - DNA, 44 bp, synthetic construct
  misc_feature 1..44: note = oligonucleotide decoy
  source 1..44: mol_type = other DNA
aagatggctccaccggtgttatatcacgtgtaaataaacacctg

SEQ ID NO: 1735 - DNA, 44 bp, synthetic construct
  misc_feature 1..44: note = oligonucleotide decoy
  source 1..44: mol_type = other DNA
aagatggctccaccggtgttatgtcacgtgtaaacaaacacctg

SEQ ID NO: 1736 - DNA, 44 bp, synthetic construct
  misc_feature 1..44: note = oligonucleotide decoy
  source 1..44: mol_type = other DNA
aagatggctccaccggtgttatgtcacgtgtaaataaacacctg

SEQ ID NO: 1737 - DNA, 44 bp, synthetic construct
  misc_feature 1..44: note = oligonucleotide decoy
  source 1..44: mol_type = other DNA
aagatggctccaccgttgttacatcacgtgtaaacaaacacctg

SEQ ID NO: 1738 - DNA, 44 bp, synthetic construct
  misc_feature 1..44: note = oligonucleotide decoy
  source 1..44: mol_type = other DNA
aagatggctccaccgttgttacatcacgtgtaaataaacacctg

SEQ ID NO: 1739 - DNA, 44 bp, synthetic construct
  misc_feature 1..44: note = oligonucleotide decoy
  source 1..44: mol_type = other DNA
aagatggctccaccgttgttacgtcacgtgtaaacaaacacctg

SEQ ID NO: 1740 - DNA, 44 bp, synthetic construct
  misc_feature 1..44: note = oligonucleotide decoy
  source 1..44: mol_type = other DNA
aagatggctccaccgttgttacgtcacgtgtaaataaacacctg

SEQ ID NO: 1741 - DNA, 44 bp, synthetic construct
  misc_feature 1..44: note = oligonucleotide decoy
  source 1..44: mol_type = other DNA
aagatggctccaccgttgttatatcacgtgtaaacaaacacctg

SEQ ID NO: 1742 - DNA, 44 bp, synthetic construct
  misc_feature 1..44: note = oligonucleotide decoy
  source 1..44: mol_type = other DNA
aagatggctccaccgttgttatatcacgtgtaaataaacacctg

SEQ ID NO: 1743 - DNA, 44 bp, synthetic construct
  misc_feature 1..44: note = oligonucleotide decoy
  source 1..44: mol_type = other DNA
aagatggctccaccgttgttatgtcacgtgtaaacaaacacctg

SEQ ID NO: 1744 - DNA, 44 bp, synthetic construct
  misc_feature 1..44: note = oligonucleotide decoy
  source 1..44: mol_type = other DNA
aagatggctccaccgttgttatgtcacgtgtaaataaacacctg

SEQ ID NO: 1745 - DNA, 44 bp, synthetic construct
  misc_feature 1..44: note = oligonucleotide decoy
  source 1..44: mol_type = other DNA
aaaatggctccaccgatgttacatcacgtgtaaacaaacacctg

SEQ ID NO: 1746 - DNA, 44 bp, synthetic construct
  misc_feature 1..44: note = oligonucleotide decoy
  source 1..44: mol_type = other DNA
aaaatggctccaccgatgttacatcacgtgtaaataaacacctg

SEQ ID NO: 1747 - DNA, 44 bp, synthetic construct
  misc_feature 1..44: note = oligonucleotide decoy
  source 1..44: mol_type = other DNA
aaaatggctccaccgatgttacgtcacgtgtaaacaaacacctg

SEQ ID NO: 1748 - DNA, 44 bp, synthetic construct
  misc_feature 1..44: note = oligonucleotide decoy
  source 1..44: mol_type = other DNA
aaaatggctccaccgatgttacgtcacgtgtaaataaacacctg

SEQ ID NO: 1749 - DNA, 44 bp, synthetic construct
  misc_feature 1..44: note = oligonucleotide decoy
  source 1..44: mol_type = other DNA
aaaatggctccaccgatgttatatcacgtgtaaacaaacacctg

SEQ ID NO: 1750 - DNA, 44 bp, synthetic construct
  misc_feature 1..44: note = oligonucleotide decoy
  source 1..44: mol_type = other DNA
aaaatggctccaccgatgttatatcacgtgtaaataaacacctg

SEQ ID NO: 1751 - DNA, 44 bp, synthetic construct
  misc_feature 1..44: note = oligonucleotide decoy
  source 1..44: mol_type = other DNA
aaaatggctccaccgatgttatgtcacgtgtaaacaaacacctg

SEQ ID NO: 1752 - DNA, 44 bp, synthetic construct
  misc_feature 1..44: note = oligonucleotide decoy
  source 1..44: mol_type = other DNA
aaaatggctccaccgatgttatgtcacgtgtaaataaacacctg

SEQ ID NO: 1753 - DNA, 44 bp, synthetic construct
  misc_feature 1..44: note = oligonucleotide decoy
  source 1..44: mol_type = other DNA
aaaatggctccaccgctgttacatcacgtgtaaacaaacacctg

SEQ ID NO: 1754 - DNA, 44 bp, synthetic construct
  misc_feature 1..44: note = oligonucleotide decoy
  source 1..44: mol_type = other DNA
aaaatggctccaccgctgttacatcacgtgtaaataaacacctg

SEQ ID NO: 1755 - DNA, 44 bp, synthetic construct
  misc_feature 1..44: note = oligonucleotide decoy
  source 1..44: mol_type = other DNA
aaaatggctccaccgctgttacgtcacgtgtaaacaaacacctg

SEQ ID NO: 1756 - DNA, 44 bp, synthetic construct
  misc_feature 1..44: note = oligonucleotide decoy
  source 1..44: mol_type = other DNA
aaaatggctccaccgctgttacgtcacgtgtaaataaacacctg

SEQ ID NO: 1757 - DNA, 44 bp, synthetic construct
  misc_feature 1..44: note = oligonucleotide decoy
  source 1..44: mol_type = other DNA
aaaatggctccaccgctgttatatcacgtgtaaacaaacacctg

SEQ ID NO: 1758 - DNA, 44 bp, synthetic construct
  misc_feature 1..44: note = oligonucleotide decoy
  source 1..44: mol_type = other DNA
aaaatggctccaccgctgttatatcacgtgtaaataaacacctg

SEQ ID NO: 1759 - DNA, 44 bp, synthetic construct
  misc_feature 1..44: note = oligonucleotide decoy
  source 1..44: mol_type = other DNA
aaaatggctccaccgctgttatgtcacgtgtaaacaaacacctg

SEQ ID NO: 1760 - DNA, 44 bp, synthetic construct
  misc_feature 1..44: note = oligonucleotide decoy
  source 1..44: mol_type = other DNA
aaaatggctccaccgctgttatgtcacgtgtaaataaacacctg

SEQ ID NO: 1761 - DNA, 44 bp, synthetic construct
  misc_feature 1..44: note = oligonucleotide decoy
  source 1..44: mol_type = other DNA
aaaatggctccaccggtgttacatcacgtgtaaacaaacacctg

SEQ ID NO: 1762 - DNA, 44 bp, synthetic construct
  misc_feature 1..44: note = oligonucleotide decoy
  source 1..44: mol_type = other DNA
aaaatggctccaccggtgttacatcacgtgtaaataaacacctg

SEQ ID NO: 1763 - DNA, 44 bp, synthetic construct
  misc_feature 1..44: note = oligonucleotide decoy
  source 1..44: mol_type = other DNA
aaaatggctccaccggtgttacgtcacgtgtaaacaaacacctg

SEQ ID NO: 1764 - DNA, 44 bp, synthetic construct
  misc_feature 1..44: note = oligonucleotide decoy
  source 1..44: mol_type = other DNA
aaaatggctccaccggtgttacgtcacgtgtaaataaacacctg

SEQ ID NO: 1765 - DNA, 44 bp, synthetic construct
  misc_feature 1..44: note = oligonucleotide decoy
  source 1..44: mol_type = other DNA
aaaatggctccaccggtgttatatcacgtgtaaacaaacacctg

SEQ ID NO: 1766 - DNA, 44 bp, synthetic construct
  misc_feature 1..44: note = oligonucleotide decoy
  source 1..44: mol_type = other DNA
aaaatggctccaccggtgttatatcacgtgtaaataaacacctg

SEQ ID NO: 1767 - DNA, 44 bp, synthetic construct
  misc_feature 1..44: note = oligonucleotide decoy
  source 1..44: mol_type = other DNA
aaaatggctccaccggtgttatgtcacgtgtaaacaaacacctg

SEQ ID NO: 1768 - DNA, 44 bp, synthetic construct
  misc_feature 1..44: note = oligonucleotide decoy
  source 1..44: mol_type = other DNA
aaaatggctccaccggtgttatgtcacgtgtaaataaacacctg

SEQ ID NO: 1769 - DNA, 44 bp, synthetic construct
  misc_feature 1..44: note = oligonucleotide decoy
  source 1..44: mol_type = other DNA
aaaatggctccaccgttgttacatcacgtgtaaacaaacacctg

SEQ ID NO: 1770 - DNA, 44 bp, synthetic construct
  misc_feature 1..44: note = oligonucleotide decoy
  source 1..44: mol_type = other DNA
aaaatggctccaccgttgttacatcacgtgtaaataaacacctg

SEQ ID NO: 1771 - DNA, 44 bp, synthetic construct
  misc_feature 1..44: note = oligonucleotide decoy
  source 1..44: mol_type = other DNA
aaaatggctccaccgttgttacgtcacgtgtaaacaaacacctg

SEQ ID NO: 1772 - DNA, 44 bp, synthetic construct
  misc_feature 1..44: note = oligonucleotide decoy
  source 1..44: mol_type = other DNA
aaaatggctccaccgttgttacgtcacgtgtaaataaacacctg

SEQ ID NO: 1773 - DNA, 44 bp, synthetic construct
  misc_feature 1..44: note = oligonucleotide decoy
  source 1..44: mol_type = other DNA
aaaatggctccaccgttgttatatcacgtgtaaacaaacacctg

SEQ ID NO: 1774 - DNA, 44 bp, synthetic construct
  misc_feature 1..44: note = oligonucleotide decoy
  source 1..44: mol_type = other DNA
aaaatggctccaccgttgttatatcacgtgtaaataaacacctg

SEQ ID NO: 1775 - DNA, 44 bp, synthetic construct
  misc_feature 1..44: note = oligonucleotide decoy
  source 1..44: mol_type = other DNA
aaaatggctccaccgttgttatgtcacgtgtaaacaaacacctg

SEQ ID NO: 1776 - DNA, 44 bp, synthetic construct
  misc_feature 1..44: note = oligonucleotide decoy
  source 1..44: mol_type = other DNA
aaaatggctccaccgttgttatgtcacgtgtaaataaacacctg

SEQ ID NO: 1777 - DNA, 44 bp, synthetic construct
  misc_feature 1..44: note = oligonucleotide decoy
  source 1..44: mol_type = other DNA
aagatggctccatcgatgacataacacgtgtaaacaaacaggtg

SEQ ID NO: 1778 - DNA, 44 bp, synthetic construct
  misc_feature 1..44: note = oligonucleotide decoy
  source 1..44: mol_type = other DNA
aagatggctccatcgatgacataacacgtgtaaataaacaggtg

SEQ ID NO: 1779 - DNA, 44 bp, synthetic construct
  misc_feature 1..44: note = oligonucleotide decoy
  source 1..44: mol_type = other DNA
aagatggctccatcgatgacgtaacacgtgtaaacaaacaggtg

SEQ ID NO: 1780 - DNA, 44 bp, synthetic construct
  misc_feature 1..44: note = oligonucleotide decoy
  source 1..44: mol_type = other DNA
aagatggctccatcgatgacgtaacacgtgtaaataaacaggtg

SEQ ID NO: 1781 - DNA, 44 bp, synthetic construct
  misc_feature 1..44: note = oligonucleotide decoy
  source 1..44: mol_type = other DNA
aagatggctccatcgatgatataacacgtgtaaacaaacaggtg

SEQ ID NO: 1782 - DNA, 44 bp, synthetic construct
  misc_feature 1..44: note = oligonucleotide decoy
  source 1..44: mol_type = other DNA
aagatggctccatcgatgatataacacgtgtaaataaacaggtg

SEQ ID NO: 1783 - DNA, 44 bp, synthetic construct
  misc_feature 1..44: note = oligonucleotide decoy
  source 1..44: mol_type = other DNA
aagatggctccatcgatgatgtaacacgtgtaaacaaacaggtg

SEQ ID NO: 1784 - DNA, 44 bp, synthetic construct
  misc_feature 1..44: note = oligonucleotide decoy
  source 1..44: mol_type = other DNA
aagatggctccatcgatgatgtaacacgtgtaaataaacaggtg

SEQ ID NO: 1785 - DNA, 44 bp, synthetic construct
  misc_feature 1..44: note = oligonucleotide decoy
  source 1..44: mol_type = other DNA
aagatggctccatcggtgacataacacgtgtaaacaaacaggtg

SEQ ID NO: 1786 - DNA, 44 bp, synthetic construct
  misc_feature 1..44: note = oligonucleotide decoy
  source 1..44: mol_type = other DNA
aagatggctccatcggtgacataacacgtgtaaataaacaggtg

SEQ ID NO: 1787 - DNA, 44 bp, synthetic construct
  misc_feature 1..44: note = oligonucleotide decoy
  source 1..44: mol_type = other DNA
aagatggctccatcggtgacgtaacacgtgtaaacaaacaggtg

SEQ ID NO: 1788 - DNA, 44 bp, synthetic construct
  misc_feature 1..44: note = oligonucleotide decoy
  source 1..44: mol_type = other DNA
aagatggctccatcggtgacgtaacacgtgtaaataaacaggtg

SEQ ID NO: 1789 - DNA, 44 bp, synthetic construct
  misc_feature 1..44: note = oligonucleotide decoy
  source 1..44: mol_type = other DNA
aagatggctccatcggtgatataacacgtgtaaacaaacaggtg

SEQ ID NO: 1790 - DNA, 44 bp, synthetic construct
  misc_feature 1..44: note = oligonucleotide decoy
  source 1..44: mol_type = other DNA
aagatggctccatcggtgatataacacgtgtaaataaacaggtg

SEQ ID NO: 1791 - DNA, 44 bp, synthetic construct
  misc_feature 1..44: note = oligonucleotide decoy
  source 1..44: mol_type = other DNA
aagatggctccatcggtgatgtaacacgtgtaaacaaacaggtg

SEQ ID NO: 1792 - DNA, 44 bp, synthetic construct
  misc_feature 1..44: note = oligonucleotide decoy
  source 1..44: mol_type = other DNA
aagatggctccatcggtgatgtaacacgtgtaaataaacaggtg

SEQ ID NO: 1793 - DNA, 44 bp, synthetic construct
  misc_feature 1..44: note = oligonucleotide decoy
  source 1..44: mol_type = other DNA
aaaatggctccatcgatgacataacacgtgtaaacaaacaggtg

SEQ ID NO: 1794 - DNA, 44 bp, synthetic construct
  misc_feature 1..44: note = oligonucleotide decoy
  source 1..44: mol_type = other DNA
aaaatggctccatcgatgacataacacgtgtaaataaacaggtg

SEQ ID NO: 1795 - DNA, 44 bp, synthetic construct
  misc_feature 1..44: note = oligonucleotide decoy
  source 1..44: mol_type = other DNA
aaaatggctccatcgatgacgtaacacgtgtaaacaaacaggtg

SEQ ID NO: 1796 - DNA, 44 bp, synthetic construct
  misc_feature 1..44: note = oligonucleotide decoy
  source 1..44: mol_type = other DNA
aaaatggctccatcgatgacgtaacacgtgtaaataaacaggtg

SEQ ID NO: 1797 - DNA, 44 bp, synthetic construct
  misc_feature 1..44: note = oligonucleotide decoy
  source 1..44: mol_type = other DNA
aaaatggctccatcgatgatataacacgtgtaaacaaacaggtg

SEQ ID NO: 1798 - DNA, 44 bp, synthetic construct
  misc_feature 1..44: note = oligonucleotide decoy
  source 1..44: mol_type = other DNA
aaaatggctccatcgatgatataacacgtgtaaataaacaggtg

SEQ ID NO: 1799 - DNA, 44 bp, synthetic construct
  misc_feature 1..44: note = oligonucleotide decoy
  source 1..44: mol_type = other DNA
aaaatggctccatcgatgatgtaacacgtgtaaacaaacaggtg

SEQ ID NO: 1800 - DNA, 44 bp, synthetic construct
  misc_feature 1..44: note = oligonucleotide decoy
  source 1..44: mol_type = other DNA
aaaatggctccatcgatgatgtaacacgtgtaaataaacaggtg

SEQ ID NO: 1801 - DNA, 44 bp, synthetic construct
  misc_feature 1..44: note = oligonucleotide decoy
  source 1..44: mol_type = other DNA
aaaatggctccatcggtgacataacacgtgtaaacaaacaggtg

SEQ ID NO: 1802 - DNA, 44 bp, synthetic construct
  misc_feature 1..44: note = oligonucleotide decoy
  source 1..44: mol_type = other DNA
aaaatggctccatcggtgacataacacgtgtaaataaacaggtg

SEQ ID NO: 1803 - DNA, 44 bp, synthetic construct
  misc_feature 1..44: note = oligonucleotide decoy
  source 1..44: mol_type = other DNA
aaaatggctccatcggtgacgtaacacgtgtaaacaaacaggtg

SEQ ID NO: 1804 - DNA, 44 bp, synthetic construct
  misc_feature 1..44: note = oligonucleotide decoy
  source 1..44: mol_type = other DNA
aaaatggctccatcggtgacgtaacacgtgtaaataaacaggtg

SEQ ID NO: 1805 - DNA, 44 bp, synthetic construct
  misc_feature 1..44: note = oligonucleotide decoy
  source 1..44: mol_type = other DNA
aaaatggctccatcggtgatataacacgtgtaaacaaacaggtg

SEQ ID NO: 1806 - DNA, 44 bp, synthetic construct
  misc_feature 1..44: note = oligonucleotide decoy
  source 1..44: mol_type = other DNA
aaaatggctccatcggtgatataacacgtgtaaataaacaggtg

SEQ ID NO: 1807 - DNA, 44 bp, synthetic construct
  misc_feature 1..44: note = oligonucleotide decoy
  source 1..44: mol_type = other DNA
aaaatggctccatcggtgatgtaacacgtgtaaacaaacaggtg

SEQ ID NO: 1808 - DNA, 44 bp, synthetic construct
  misc_feature 1..44: note = oligonucleotide decoy
  source 1..44: mol_type = other DNA
aaaatggctccatcggtgatgtaacacgtgtaaataaacaggtg

SEQ ID NO: 1809 - DNA, 44 bp, synthetic construct
  misc_feature 1..44: note = oligonucleotide decoy
  source 1..44: mol_type = other DNA
aagatggctccaccgatgacataacacgtgtaaacaaacaggtg

SEQ ID NO: 1810 - DNA, 44 bp, synthetic construct
  misc_feature 1..44: note = oligonucleotide decoy
  source 1..44: mol_type = other DNA
aagatggctccaccgatgacataacacgtgtaaataaacaggtg

SEQ ID NO: 1811 - DNA, 44 bp, synthetic construct
  misc_feature 1..44: note = oligonucleotide decoy
  source 1..44: mol_type = other DNA
aagatggctccaccgatgacgtaacacgtgtaaacaaacaggtg

SEQ ID NO: 1812 - DNA, 44 bp, synthetic construct
  misc_feature 1..44: note = oligonucleotide decoy
  source 1..44: mol_type = other DNA
aagatggctccaccgatgacgtaacacgtgtaaataaacaggtg

SEQ ID NO: 1813 - DNA, 44 bp, synthetic construct
  misc_feature 1..44: note = oligonucleotide decoy
  source 1..44: mol_type = other DNA
aagatggctccaccgatgatataacacgtgtaaacaaacaggtg

SEQ ID NO: 1814 - DNA, 44 bp, synthetic construct
  misc_feature 1..44: note = oligonucleotide decoy
  source 1..44: mol_type = other DNA
aagatggctccaccgatgatataacacgtgtaaataaacaggtg

SEQ ID NO: 1815 - DNA, 44 bp, synthetic construct
  misc_feature 1..44: note = oligonucleotide decoy
  source 1..44: mol_type = other DNA
aagatggctccaccgatgatgtaacacgtgtaaacaaacaggtg

SEQ ID NO: 1816 - DNA, 44 bp, synthetic construct
  misc_feature 1..44: note = oligonucleotide decoy
  source 1..44: mol_type = other DNA
aagatggctccaccgatgatgtaacacgtgtaaataaacaggtg

SEQ ID NO: 1817 - DNA, 44 bp, synthetic construct
  misc_feature 1..44: note = oligonucleotide decoy
  source 1..44: mol_type = other DNA
aagatggctccaccggtgacataacacgtgtaaacaaacaggtg

SEQ ID NO: 1818 - DNA, 44 bp, synthetic construct
  misc_feature 1..44: note = oligonucleotide decoy
  source 1..44: mol_type = other DNA
aagatggctccaccggtgacataacacgtgtaaataaacaggtg

SEQ ID NO: 1819 - DNA, 44 bp, synthetic construct
  misc_feature 1..44: note = oligonucleotide decoy
  source 1..44: mol_type = other DNA
aagatggctccaccggtgacgtaacacgtgtaaacaaacaggtg

SEQ ID NO: 1820 - DNA, 44 bp, synthetic construct
  misc_feature 1..44: note = oligonucleotide decoy
  source 1..44: mol_type = other DNA
aagatggctccaccggtgacgtaacacgtgtaaataaacaggtg

SEQ ID NO: 1821 - DNA, 44 bp, synthetic construct
  misc_feature 1..44: note = oligonucleotide decoy
  source 1..44: mol_type = other DNA
aagatggctccaccggtgatataacacgtgtaaacaaacaggtg

SEQ ID NO: 1822 - DNA, 44 bp, synthetic construct
  misc_feature 1..44: note = oligonucleotide decoy
  source 1..44: mol_type = other DNA
aagatggctccaccggtgatataacacgtgtaaataaacaggtg

SEQ ID NO: 1823 - DNA, 44 bp, synthetic construct
  misc_feature 1..44: note = oligonucleotide decoy
  source 1..44: mol_type = other DNA
aagatggctccaccggtgatgtaacacgtgtaaacaaacaggtg

SEQ ID NO: 1824 - DNA, 44 bp, synthetic construct
  misc_feature 1..44: note = oligonucleotide decoy
  source 1..44: mol_type = other DNA
aagatggctccaccggtgatgtaacacgtgtaaataaacaggtg

SEQ ID NO: 1825 - DNA, 44 bp, synthetic construct
  misc_feature 1..44: note = oligonucleotide decoy
  source 1..44: mol_type = other DNA
aaaatggctccaccgatgacataacacgtgtaaacaaacaggtg

SEQ ID NO: 1826 - DNA, 44 bp, synthetic construct
  misc_feature 1..44: note = oligonucleotide decoy
  source 1..44: mol_type = other DNA
aaaatggctccaccgatgacataacacgtgtaaataaacaggtg

SEQ ID NO: 1827 - DNA, 44 bp, synthetic construct
  misc_feature 1..44: note = oligonucleotide decoy
  source 1..44: mol_type = other DNA
aaaatggctccaccgatgacgtaacacgtgtaaacaaacaggtg

SEQ ID NO: 1828 - DNA, 44 bp, synthetic construct
  misc_feature 1..44: note = oligonucleotide decoy
  source 1..44: mol_type = other DNA
aaaatggctccaccgatgacgtaacacgtgtaaataaacaggtg

SEQ ID NO: 1829 - DNA, 44 bp, synthetic construct
  misc_feature 1..44: note = oligonucleotide decoy
  source 1..44: mol_type = other DNA
aaaatggctccaccgatgatataacacgtgtaaacaaacaggtg

SEQ ID NO: 1830 - DNA, 44 bp, synthetic construct
  misc_feature 1..44: note = oligonucleotide decoy
  source 1..44: mol_type = other DNA
aaaatggctccaccgatgatataacacgtgtaaataaacaggtg

SEQ ID NO: 1831 - DNA, 44 bp, synthetic construct
  misc_feature 1..44: note = oligonucleotide decoy
  source 1..44: mol_type = other DNA
aaaatggctccaccgatgatgtaacacgtgtaaacaaacaggtg

SEQ ID NO: 1832 - DNA, 44 bp, synthetic construct
  misc_feature 1..44: note = oligonucleotide decoy
  source 1..44: mol_type = other DNA
aaaatggctccaccgatgatgtaacacgtgtaaataaacaggtg

SEQ ID NO: 1833 - DNA, 44 bp, synthetic construct
  misc_feature 1..44: note = oligonucleotide decoy
  source 1..44: mol_type = other DNA
aaaatggctccaccggtgacataacacgtgtaaacaaacaggtg

SEQ ID NO: 1834 - DNA, 44 bp, synthetic construct
  misc_feature 1..44: note = oligonucleotide decoy
  source 1..44: mol_type = other DNA
aaaatggctccaccggtgacataacacgtgtaaataaacaggtg

SEQ ID NO: 1835 - DNA, 44 bp, synthetic construct
  misc_feature 1..44: note = oligonucleotide decoy
  source 1..44: mol_type = other DNA
aaaatggctccaccggtgacgtaacacgtgtaaacaaacaggtg

SEQ ID NO: 1836 - DNA, 44 bp, synthetic construct
  misc_feature 1..44: note = oligonucleotide decoy
  source 1..44: mol_type = other DNA
aaaatggctccaccggtgacgtaacacgtgtaaataaacaggtg

SEQ ID NO: 1837 - DNA, 44 bp, synthetic construct
  misc_feature 1..44: note = oligonucleotide decoy
  source 1..44: mol_type = other DNA
aaaatggctccaccggtgatataacacgtgtaaacaaacaggtg

SEQ ID NO: 1838 - DNA, 44 bp, synthetic construct
  misc_feature 1..44: note = oligonucleotide decoy
  source 1..44: mol_type = other DNA
aaaatggctccaccggtgatataacacgtgtaaataaacaggtg

SEQ ID NO: 1839 - DNA, 44 bp, synthetic construct
  misc_feature 1..44: note = oligonucleotide decoy
  source 1..44: mol_type = other DNA
aaaatggctccaccggtgatgtaacacgtgtaaacaaacaggtg

SEQ ID NO: 1840 - DNA, 44 bp, synthetic construct
  misc_feature 1..44: note = oligonucleotide decoy
  source 1..44: mol_type = other DNA
aaaatggctccaccggtgatgtaacacgtgtaaataaacaggtg

SEQ ID NO: 1841 - DNA, 44 bp, synthetic construct
  misc_feature 1..44: note = oligonucleotide decoy
  source 1..44: mol_type = other DNA
aagatggctccatcgatgttacatcacgtgtaaacaaacaggtg

SEQ ID NO: 1842 - DNA, 44 bp, synthetic construct
  misc_feature 1..44: note = oligonucleotide decoy
  source 1..44: mol_type = other DNA
aagatggctccatcgatgttacatcacgtgtaaataaacaggtg

SEQ ID NO: 1843 - DNA, 44 bp, synthetic construct
  misc_feature 1..44: note = oligonucleotide decoy
  source 1..44: mol_type = other DNA
aagatggctccatcgatgttacgtcacgtgtaaacaaacaggtg

SEQ ID NO: 1844 - DNA, 44 bp, synthetic construct
  misc_feature 1..44: note = oligonucleotide decoy
  source 1..44: mol_type = other DNA
aagatggctccatcgatgttacgtcacgtgtaaataaacaggtg

SEQ ID NO: 1845 - DNA, 44 bp, synthetic construct
  misc_feature 1..44: note = oligonucleotide decoy
  source 1..44: mol_type = other DNA
aagatggctccatcgatgttatatcacgtgtaaacaaacaggtg

SEQ ID NO: 1846 - DNA, 44 bp, synthetic construct
  misc_feature 1..44: note = oligonucleotide decoy
  source 1..44: mol_type = other DNA
aagatggctccatcgatgttatatcacgtgtaaataaacaggtg

SEQ ID NO: 1847 - DNA, 44 bp, synthetic construct
  misc_feature 1..44: note = oligonucleotide decoy
  source 1..44: mol_type = other DNA
aagatggctccatcgatgttatgtcacgtgtaaacaaacaggtg

SEQ ID NO: 1848 - DNA, 44 bp, synthetic construct
  misc_feature 1..44: note = oligonucleotide decoy
  source 1..44: mol_type = other DNA
aagatggctccatcgatgttatgtcacgtgtaaataaacaggtg

SEQ ID NO: 1849 - DNA, 44 bp, synthetic construct
  misc_feature 1..44: note = oligonucleotide decoy
  source 1..44: mol_type = other DNA
aagatggctccatcgctgttacatcacgtgtaaacaaacaggtg

SEQ ID NO: 1850 - DNA, 44 bp, synthetic construct
  misc_feature 1..44: note = oligonucleotide decoy
  source 1..44: mol_type = other DNA
aagatggctccatcgctgttacatcacgtgtaaataaacaggtg

SEQ ID NO: 1851 - DNA, 44 bp, synthetic construct
  misc_feature 1..44: note = oligonucleotide decoy
  source 1..44: mol_type = other DNA
aagatggctccatcgctgttacgtcacgtgtaaacaaacaggtg

SEQ ID NO: 1852 - DNA, 44 bp, synthetic construct
  misc_feature 1..44: note = oligonucleotide decoy
  source 1..44: mol_type = other DNA
aagatggctccatcgctgttacgtcacgtgtaaataaacaggtg

SEQ ID NO: 1853 - DNA, 44 bp, synthetic construct
  misc_feature 1..44: note = oligonucleotide decoy
  source 1..44: mol_type = other DNA
aagatggctccatcgctgttatatcacgtgtaaacaaacaggtg

SEQ ID NO: 1854 - DNA, 44 bp, synthetic construct
  misc_feature 1..44: note = oligonucleotide decoy
  source 1..44: mol_type = other DNA
aagatggctccatcgctgttatatcacgtgtaaataaacaggtg

SEQ ID NO: 1855 - DNA, 44 bp, synthetic construct
  misc_feature 1..44: note = oligonucleotide decoy
  source 1..44: mol_type = other DNA
aagatggctccatcgctgttatgtcacgtgtaaacaaacaggtg

SEQ ID NO: 1856 - DNA, 44 bp, synthetic construct
  misc_feature 1..44: note = oligonucleotide decoy
  source 1..44: mol_type = other DNA
aagatggctccatcgctgttatgtcacgtgtaaataaacaggtg

SEQ ID NO: 1857 - DNA, 44 bp, synthetic construct
  misc_feature 1..44: note = oligonucleotide decoy
  source 1..44: mol_type = other DNA
aagatggctccatcggtgttacatcacgtgtaaacaaacaggtg

SEQ ID NO: 1858 - DNA, 44 bp, synthetic construct
  misc_feature 1..44: note = oligonucleotide decoy
  source 1..44: mol_type = other DNA
aagatggctccatcggtgttacatcacgtgtaaataaacaggtg

SEQ ID NO: 1859 - DNA, 44 bp, synthetic construct
  misc_feature 1..44: note = oligonucleotide decoy
  source 1..44: mol_type = other DNA
aagatggctccatcggtgttacgtcacgtgtaaacaaacaggtg

SEQ ID NO: 1860 - DNA, 44 bp, synthetic construct
  misc_feature 1..44: note = oligonucleotide decoy
  source 1..44: mol_type = other DNA
aagatggctccatcggtgttacgtcacgtgtaaataaacaggtg

SEQ ID NO: 1861 - DNA, 44 bp, synthetic construct
  misc_feature 1..44: note = oligonucleotide decoy
  source 1..44: mol_type = other DNA
aagatggctccatcggtgttatatcacgtgtaaacaaacaggtg

SEQ ID NO: 1862 - DNA, 44 bp, synthetic construct
  misc_feature 1..44: note = oligonucleotide decoy
  source 1..44: mol_type = other DNA
aagatggctccatcggtgttatatcacgtgtaaataaacaggtg

SEQ ID NO: 1863 - DNA, 44 bp, synthetic construct
  misc_feature 1..44: note = oligonucleotide decoy
  source 1..44: mol_type = other DNA
aagatggctccatcggtgttatgtcacgtgtaaacaaacaggtg

SEQ ID NO: 1864 - DNA, 44 bp, synthetic construct
  misc_feature 1..44: note = oligonucleotide decoy
  source 1..44: mol_type = other DNA
aagatggctccatcggtgttatgtcacgtgtaaataaacaggtg

SEQ ID NO: 1865 - DNA, 44 bp, synthetic construct
  misc_feature 1..44: note = oligonucleotide decoy
  source 1..44: mol_type = other DNA
aagatggctccatcgttgttacatcacgtgtaaacaaacaggtg

SEQ ID NO: 1866 - DNA, 44 bp, synthetic construct
  misc_feature 1..44: note = oligonucleotide decoy
  source 1..44: mol_type = other DNA
aagatggctccatcgttgttacatcacgtgtaaataaacaggtg

SEQ ID NO: 1867 - DNA, 44 bp, synthetic construct
  misc_feature 1..44: note = oligonucleotide decoy
  source 1..44: mol_type = other DNA
aagatggctccatcgttgttacgtcacgtgtaaacaaacaggtg

SEQ ID NO: 1868 - DNA, 44 bp, synthetic construct
  misc_feature 1..44: note = oligonucleotide decoy
  source 1..44: mol_type = other DNA
aagatggctccatcgttgttacgtcacgtgtaaataaacaggtg

SEQ ID NO: 1869 - DNA, 44 bp, synthetic construct
  misc_feature 1..44: note = oligonucleotide decoy
  source 1..44: mol_type = other DNA
aagatggctccatcgttgttatatcacgtgtaaacaaacaggtg

SEQ ID NO: 1870 - DNA, 44 bp, synthetic construct
  misc_feature 1..44: note = oligonucleotide decoy
  source 1..44: mol_type = other DNA
aagatggctccatcgttgttatatcacgtgtaaataaacaggtg

SEQ ID NO: 1871 - DNA, 44 bp, synthetic construct
  misc_feature 1..44: note = oligonucleotide decoy
  source 1..44: mol_type = other DNA
aagatggctccatcgttgttatgtcacgtgtaaacaaacaggtg

SEQ ID NO: 1872 - DNA, 44 bp, synthetic construct
  misc_feature 1..44: note = oligonucleotide decoy
  source 1..44: mol_type = other DNA
aagatggctccatcgttgttatgtcacgtgtaaataaacaggtg

SEQ ID NO: 1873 - DNA, 44 bp, synthetic construct
  misc_feature 1..44: note = oligonucleotide decoy
  source 1..44: mol_type = other DNA
aaaatggctccatcgatgttacatcacgtgtaaacaaacaggtg

SEQ ID NO: 1874 - DNA, 44 bp, synthetic construct
  misc_feature 1..44: note = oligonucleotide decoy
  source 1..44: mol_type = other DNA
aaaatggctccatcgatgttacatcacgtgtaaataaacaggtg

SEQ ID NO: 1875 - DNA, 44 bp, synthetic construct
  misc_feature 1..44: note = oligonucleotide decoy
  source 1..44: mol_type = other DNA
aaaatggctccatcgatgttacgtcacgtgtaaacaaacaggtg

SEQ ID NO: 1876 - DNA, 44 bp, synthetic construct
  misc_feature 1..44: note = oligonucleotide decoy
  source 1..44: mol_type = other DNA
aaaatggctccatcgatgttacgtcacgtgtaaataaacaggtg

SEQ ID NO: 1877 - DNA, 44 bp, synthetic construct
  misc_feature 1..44: note = oligonucleotide decoy
  source 1..44: mol_type = other DNA
aaaatggctccatcgatgttatatcacgtgtaaacaaacaggtg

SEQ ID NO: 1878 - DNA, 44 bp, synthetic construct
  misc_feature 1..44: note = oligonucleotide decoy
  source 1..44: mol_type = other DNA
aaaatggctccatcgatgttatatcacgtgtaaataaacaggtg

SEQ ID NO: 1879 - DNA, 44 bp, synthetic construct
  misc_feature 1..44: note = oligonucleotide decoy
  source 1..44: mol_type = other DNA
aaaatggctccatcgatgttatgtcacgtgtaaacaaacaggtg

SEQ ID NO: 1880 - DNA, 44 bp, synthetic construct
  misc_feature 1..44: note = oligonucleotide decoy
  source 1..44: mol_type = other DNA
aaaatggctccatcgatgttatgtcacgtgtaaataaacaggtg

SEQ ID NO: 1881 - DNA, 44 bp, synthetic construct
  misc_feature 1..44: note = oligonucleotide decoy
  source 1..44: mol_type = other DNA
aaaatggctccatcgctgttacatcacgtgtaaacaaacaggtg

SEQ ID NO: 1882 - DNA, 44 bp, synthetic construct
  misc_feature 1..44: note = oligonucleotide decoy
  source 1..44: mol_type = other DNA
aaaatggctccatcgctgttacatcacgtgtaaataaacaggtg

SEQ ID NO: 1883 - DNA, 44 bp, synthetic construct
  misc_feature 1..44: note = oligonucleotide decoy
  source 1..44: mol_type = other DNA
aaaatggctccatcgctgttacgtcacgtgtaaacaaacaggtg

SEQ ID NO: 1884 - DNA, 44 bp, synthetic construct
  misc_feature 1..44: note = oligonucleotide decoy
  source 1..44: mol_type = other DNA
aaaatggctccatcgctgttacgtcacgtgtaaataaacaggtg

SEQ ID NO: 1885 - DNA, 44 bp, synthetic construct
  misc_feature 1..44: note = oligonucleotide decoy
  source 1..44: mol_type = other DNA
aaaatggctccatcgctgttatatcacgtgtaaacaaacaggtg

SEQ ID NO: 1886 - DNA, 44 bp, synthetic construct
  misc_feature 1..44: note = oligonucleotide decoy
  source 1..44: mol_type = other DNA
aaaatggctccatcgctgttatatcacgtgtaaataaacaggtg

SEQ ID NO: 1887 - DNA, 44 bp, synthetic construct
  misc_feature 1..44: note = oligonucleotide decoy
  source 1..44: mol_type = other DNA
aaaatggctccatcgctgttatgtcacgtgtaaacaaacaggtg

SEQ ID NO: 1888 - DNA, 44 bp, synthetic construct
  misc_feature 1..44: note = oligonucleotide decoy
  source 1..44: mol_type = other DNA
aaaatggctccatcgctgttatgtcacgtgtaaataaacaggtg

SEQ ID NO: 1889 - DNA, 44 bp, synthetic construct
  misc_feature 1..44: note = oligonucleotide decoy
  source 1..44: mol_type = other DNA
aaaatggctccatcggtgttacatcacgtgtaaacaaacaggtg

SEQ ID NO: 1890 - DNA, 44 bp, synthetic construct
  misc_feature 1..44: note = oligonucleotide decoy
  source 1..44: mol_type = other DNA
aaaatggctccatcggtgttacatcacgtgtaaataaacaggtg

SEQ ID NO: 1891 - DNA, 44 bp, synthetic construct
  misc_feature 1..44: note = oligonucleotide decoy
  source 1..44: mol_type = other DNA
aaaatggctccatcggtgttacgtcacgtgtaaacaaacaggtg

SEQ ID NO: 1892 - DNA, 44 bp, synthetic construct
  misc_feature 1..44: note = oligonucleotide decoy
  source 1..44: mol_type = other DNA
aaaatggctccatcggtgttacgtcacgtgtaaataaacaggtg

SEQ ID NO: 1893 - DNA, 44 bp, synthetic construct
  misc_feature 1..44: note = oligonucleotide decoy
  source 1..44: mol_type = other DNA
aaaatggctccatcggtgttatatcacgtgtaaacaaacaggtg

SEQ ID NO: 1894 - DNA, 44 bp, synthetic construct
  misc_feature 1..44: note = oligonucleotide decoy
  source 1..44: mol_type = other DNA
aaaatggctccatcggtgttatatcacgtgtaaataaacaggtg

SEQ ID NO: 1895 - DNA, 44 bp, synthetic construct
  misc_feature 1..44: note = oligonucleotide decoy
  source 1..44: mol_type = other DNA
aaaatggctccatcggtgttatgtcacgtgtaaacaaacaggtg

SEQ ID NO: 1896 - DNA, 44 bp, synthetic construct
  misc_feature 1..44: note = oligonucleotide decoy
  source 1..44: mol_type = other DNA
aaaatggctccatcggtgttatgtcacgtgtaaataaacaggtg

SEQ ID NO: 1897 - DNA, 44 bp, synthetic construct
  misc_feature 1..44: note = oligonucleotide decoy
  source 1..44: mol_type = other DNA
aaaatggctccatcgttgttacatcacgtgtaaacaaacaggtg

SEQ ID NO: 1898 - DNA, 44 bp, synthetic construct
  misc_feature 1..44: note = oligonucleotide decoy
  source 1..44: mol_type = other DNA
aaaatggctccatcgttgttacatcacgtgtaaataaacaggtg

SEQ ID NO: 1899 - DNA, 44 bp, synthetic construct
  misc_feature 1..44: note = oligonucleotide decoy
  source 1..44: mol_type = other DNA
aaaatggctccatcgttgttacgtcacgtgtaaacaaacaggtg

SEQ ID NO: 1900 - DNA, 44 bp, synthetic construct
  misc_feature 1..44: note = oligonucleotide decoy
  source 1..44: mol_type = other DNA
aaaatggctccatcgttgttacgtcacgtgtaaataaacaggtg

SEQ ID NO: 1901 - DNA, 44 bp, synthetic construct
  misc_feature 1..44: note = oligonucleotide decoy
  source 1..44: mol_type = other DNA
aaaatggctccatcgttgttatatcacgtgtaaacaaacaggtg

SEQ ID NO: 1902 - DNA, 44 bp, synthetic construct
  misc_feature 1..44: note = oligonucleotide decoy
  source 1..44: mol_type = other DNA
aaaatggctccatcgttgttatatcacgtgtaaataaacaggtg

SEQ ID NO: 1903 - DNA, 44 bp, synthetic construct
  misc_feature 1..44: note = oligonucleotide decoy
  source 1..44: mol_type = other DNA
aaaatggctccatcgttgttatgtcacgtgtaaacaaacaggtg

SEQ ID NO: 1904 - DNA, 44 bp, synthetic construct
  misc_feature 1..44: note = oligonucleotide decoy
  source 1..44: mol_type = other DNA
aaaatggctccatcgttgttatgtcacgtgtaaataaacaggtg

SEQ ID NO: 1905 - DNA, 44 bp, synthetic construct
  misc_feature 1..44: note = oligonucleotide decoy
  source 1..44: mol_type = other DNA
aagatggctccaccgatgttacatcacgtgtaaacaaacaggtg

SEQ ID NO: 1906 - DNA, 44 bp, synthetic construct
  misc_feature 1..44: note = oligonucleotide decoy
  source 1..44: mol_type = other DNA
aagatggctccaccgatgttacatcacgtgtaaataaacaggtg

SEQ ID NO: 1907 - DNA, 44 bp, synthetic construct
  misc_feature 1..44: note = oligonucleotide decoy
  source 1..44: mol_type = other DNA
aagatggctccaccgatgttacgtcacgtgtaaacaaacaggtg

SEQ ID NO: 1908 - DNA, 44 bp, synthetic construct
  misc_feature 1..44: note = oligonucleotide decoy
  source 1..44: mol_type = other DNA
aagatggctccaccgatgttacgtcacgtgtaaataaacaggtg

SEQ ID NO: 1909 - DNA, 44 bp, synthetic construct
  misc_feature 1..44: note = oligonucleotide decoy
  source 1..44: mol_type = other DNA
aagatggctccaccgatgttatatcacgtgtaaacaaacaggtg

SEQ ID NO: 1910 - DNA, 44 bp, synthetic construct
  misc_feature 1..44: note = oligonucleotide decoy
  source 1..44: mol_type = other DNA
aagatggctccaccgatgttatatcacgtgtaaataaacaggtg

SEQ ID NO: 1911 - DNA, 44 bp, synthetic construct
  misc_feature 1..44: note = oligonucleotide decoy
  source 1..44: mol_type = other DNA
aagatggctccaccgatgttatgtcacgtgtaaacaaacaggtg

SEQ ID NO: 1912 - DNA, 44 bp, synthetic construct
  misc_feature 1..44: note = oligonucleotide decoy
  source 1..44: mol_type = other DNA
aagatggctccaccgatgttatgtcacgtgtaaataaacaggtg

SEQ ID NO: 1913 - DNA, 44 bp, synthetic construct
  misc_feature 1..44: note = oligonucleotide decoy
  source 1..44: mol_type = other DNA
aagatggctccaccgctgttacatcacgtgtaaacaaacaggtg

SEQ ID NO: 1914 - DNA, 44 bp, synthetic construct
  misc_feature 1..44: note = oligonucleotide decoy
  source 1..44: mol_type = other DNA
aagatggctccaccgctgttacatcacgtgtaaataaacaggtg

SEQ ID NO: 1915 - DNA, 44 bp, synthetic construct
  misc_feature 1..44: note = oligonucleotide decoy
  source 1..44: mol_type = other DNA
aagatggctccaccgctgttacgtcacgtgtaaacaaacaggtg

SEQ ID NO: 1916 - DNA, 44 bp, synthetic construct
  misc_feature 1..44: note = oligonucleotide decoy
  source 1..44: mol_type = other DNA
aagatggctccaccgctgttacgtcacgtgtaaataaacaggtg

SEQ ID NO: 1917 - DNA, 44 bp, synthetic construct
  misc_feature 1..44: note = oligonucleotide decoy
  source 1..44: mol_type = other DNA
aagatggctccaccgctgttatatcacgtgtaaacaaacaggtg

SEQ ID NO: 1918 - DNA, 44 bp, synthetic construct
  misc_feature 1..44: note = oligonucleotide decoy
  source 1..44: mol_type = other DNA
aagatggctccaccgctgttatatcacgtgtaaataaacaggtg

SEQ ID NO: 1919 - DNA, 44 bp, synthetic construct
  misc_feature 1..44: note = oligonucleotide decoy
  source 1..44: mol_type = other DNA
aagatggctccaccgctgttatgtcacgtgtaaacaaacaggtg

SEQ ID NO: 1920 - DNA, 44 bp, synthetic construct
  misc_feature 1..44: note = oligonucleotide decoy
  source 1..44: mol_type = other DNA
aagatggctccaccgctgttatgtcacgtgtaaataaacaggtg

SEQ ID NO: 1921 - DNA, 44 bp, synthetic construct
  misc_feature 1..44: note = oligonucleotide decoy
  source 1..44: mol_type = other DNA
aagatggctccaccggtgttacatcacgtgtaaacaaacaggtg

SEQ ID NO: 1922 - DNA, 44 bp, synthetic construct
  misc_feature 1..44: note = oligonucleotide decoy
  source 1..44: mol_type = other DNA
aagatggctccaccggtgttacatcacgtgtaaataaacaggtg

SEQ ID NO: 1923 - DNA, 44 bp, synthetic construct
  misc_feature 1..44: note = oligonucleotide decoy
  source 1..44: mol_type = other DNA
aagatggctccaccggtgttacgtcacgtgtaaacaaacaggtg

SEQ ID NO: 1924 - DNA, 44 bp, synthetic construct
  misc_feature 1..44: note = oligonucleotide decoy
  source 1..44: mol_type = other DNA
aagatggctccaccggtgttacgtcacgtgtaaataaacaggtg

SEQ ID NO: 1925 - DNA, 44 bp, synthetic construct
  misc_feature 1..44: note = oligonucleotide decoy
  source 1..44: mol_type = other DNA
aagatggctccaccggtgttatatcacgtgtaaacaaacaggtg

SEQ ID NO: 1926 - DNA, 44 bp, synthetic construct
  misc_feature 1..44: note = oligonucleotide decoy
  source 1..44: mol_type = other DNA
aagatggctccaccggtgttatatcacgtgtaaataaacaggtg

SEQ ID NO: 1927 - DNA, 44 bp, synthetic construct
  misc_feature 1..44: note = oligonucleotide decoy
  source 1..44: mol_type = other DNA
aagatggctccaccggtgttatgtcacgtgtaaacaaacaggtg

SEQ ID NO: 1928 - DNA, 44 bp, synthetic construct
  misc_feature 1..44: note = oligonucleotide decoy
  source 1..44: mol_type = other DNA
aagatggctccaccggtgttatgtcacgtgtaaataaacaggtg

SEQ ID NO: 1929 - DNA, 44 bp, synthetic construct
  misc_feature 1..44: note = oligonucleotide decoy
  source 1..44: mol_type = other DNA
aagatggctccaccgttgttacatcacgtgtaaacaaacaggtg

SEQ ID NO: 1930 - DNA, 44 bp, synthetic construct
  misc_feature 1..44: note = oligonucleotide decoy
  source 1..44: mol_type = other DNA
aagatggctccaccgttgttacatcacgtgtaaataaacaggtg

SEQ ID NO: 1931 - DNA, 44 bp, synthetic construct
  misc_feature 1..44: note = oligonucleotide decoy
  source 1..44: mol_type = other DNA
aagatggctccaccgttgttacgtcacgtgtaaacaaacaggtg

SEQ ID NO: 1932 - DNA, 44 bp, synthetic construct
  misc_feature 1..44: note = oligonucleotide decoy
  source 1..44: mol_type = other DNA
aagatggctccaccgttgttacgtcacgtgtaaataaacaggtg

SEQ ID NO: 1933 - DNA, 44 bp, synthetic construct
  misc_feature 1..44: note = oligonucleotide decoy
  source 1..44: mol_type = other DNA
aagatggctccaccgttgttatatcacgtgtaaacaaacaggtg

SEQ ID NO: 1934 - DNA, 44 bp, synthetic construct
  misc_feature 1..44: note = oligonucleotide decoy
  source 1..44: mol_type = other DNA
aagatggctccaccgttgttatatcacgtgtaaataaacaggtg

SEQ ID NO: 1935 - DNA, 44 bp, synthetic construct
  misc_feature 1..44: note = oligonucleotide decoy
  source 1..44: mol_type = other DNA
aagatggctccaccgttgttatgtcacgtgtaaacaaacaggtg

SEQ ID NO: 1936 - DNA, 44 bp, synthetic construct
  misc_feature 1..44: note = oligonucleotide decoy
  source 1..44: mol_type = other DNA
aagatggctccaccgttgttatgtcacgtgtaaataaacaggtg

SEQ ID NO: 1937 - DNA, 44 bp, synthetic construct
  misc_feature 1..44: note = oligonucleotide decoy
  source 1..44: mol_type = other DNA
aaaatggctccaccgatgttacatcacgtgtaaacaaacaggtg

SEQ ID NO: 1938 - DNA, 44 bp, synthetic construct
  misc_feature 1..44: note = oligonucleotide decoy
  source 1..44: mol_type = other DNA
aaaatggctccaccgatgttacatcacgtgtaaataaacaggtg

SEQ ID NO: 1939 - DNA, 44 bp, synthetic construct
  misc_feature 1..44: note = oligonucleotide decoy
  source 1..44: mol_type = other DNA
aaaatggctccaccgatgttacgtcacgtgtaaacaaacaggtg

SEQ ID NO: 1940 - DNA, 44 bp, synthetic construct
  misc_feature 1..44: note = oligonucleotide decoy
  source 1..44: mol_type = other DNA
aaaatggctccaccgatgttacgtcacgtgtaaataaacaggtg

SEQ ID NO: 1941 - DNA, 44 bp, synthetic construct
  misc_feature 1..44: note = oligonucleotide decoy
  source 1..44: mol_type = other DNA
aaaatggctccaccgatgttatatcacgtgtaaacaaacaggtg

SEQ ID NO: 1942 - DNA, 44 bp, synthetic construct
  misc_feature 1..44: note = oligonucleotide decoy
  source 1..44: mol_type = other DNA
aaaatggctccaccgatgttatatcacgtgtaaataaacaggtg

SEQ ID NO: 1943 - DNA, 44 bp, synthetic construct
  misc_feature 1..44: note = oligonucleotide decoy
  source 1..44: mol_type = other DNA
aaaatggctccaccgatgttatgtcacgtgtaaacaaacaggtg

SEQ ID NO: 1944 - DNA, 44 bp, synthetic construct
  misc_feature 1..44: note = oligonucleotide decoy
  source 1..44: mol_type = other DNA
aaaatggctccaccgatgttatgtcacgtgtaaataaacaggtg

SEQ ID NO: 1945 - DNA, 44 bp, synthetic construct
  misc_feature 1..44: note = oligonucleotide decoy
  source 1..44: mol_type = other DNA
aaaatggctccaccgctgttacatcacgtgtaaacaaacaggtg

SEQ ID NO: 1946 - DNA, 44 bp, synthetic construct
  misc_feature 1..44: note = oligonucleotide decoy
  source 1..44: mol_type = other DNA
aaaatggctccaccgctgttacatcacgtgtaaataaacaggtg

SEQ ID NO: 1947 - DNA, 44 bp, synthetic construct
  misc_feature 1..44: note = oligonucleotide decoy
  source 1..44: mol_type = other DNA
aaaatggctccaccgctgttacgtcacgtgtaaacaaacaggtg

SEQ ID NO: 1948 - DNA, 44 bp, synthetic construct
  misc_feature 1..44: note = oligonucleotide decoy
  source 1..44: mol_type = other DNA
aaaatggctccaccgctgttacgtcacgtgtaaataaacaggtg

SEQ ID NO: 1949 - DNA, 44 bp, synthetic construct
  misc_feature 1..44: note = oligonucleotide decoy
  source 1..44: mol_type = other DNA
aaaatggctccaccgctgttatatcacgtgtaaacaaacaggtg

SEQ ID NO: 1950 - DNA, 44 bp, synthetic construct
  misc_feature 1..44: note = oligonucleotide decoy
  source 1..44: mol_type = other DNA
aaaatggctccaccgctgttatatcacgtgtaaataaacaggtg

SEQ ID NO: 1951 - DNA, 44 bp, synthetic construct
  misc_feature 1..44: note = oligonucleotide decoy
  source 1..44: mol_type = other DNA
aaaatggctccaccgctgttatgtcacgtgtaaacaaacaggtg

SEQ ID NO: 1952 - DNA, 44 bp, synthetic construct
  misc_feature 1..44: note = oligonucleotide decoy
  source 1..44: mol_type = other DNA
aaaatggctccaccgctgttatgtcacgtgtaaataaacaggtg

SEQ ID NO: 1953 - DNA, 44 bp, synthetic construct
  misc_feature 1..44: note = oligonucleotide decoy
  source 1..44: mol_type = other DNA
aaaatggctccaccggtgttacatcacgtgtaaacaaacaggtg

SEQ ID NO: 1954 - DNA, 44 bp, synthetic construct
  misc_feature 1..44: note = oligonucleotide decoy
  source 1..44: mol_type = other DNA
aaaatggctccaccggtgttacatcacgtgtaaataaacaggtg

SEQ ID NO: 1955 - DNA, 44 bp, synthetic construct
  misc_feature 1..44: note = oligonucleotide decoy
  source 1..44: mol_type = other DNA
aaaatggctccaccggtgttacgtcacgtgtaaacaaacaggtg

SEQ ID NO: 1956 - DNA, 44 bp, synthetic construct
  misc_feature 1..44: note = oligonucleotide decoy
  source 1..44: mol_type = other DNA
aaaatggctccaccggtgttacgtcacgtgtaaataaacaggtg

SEQ ID NO: 1957 - DNA, 44 bp, synthetic construct
  misc_feature 1..44: note = oligonucleotide decoy
  source 1..44: mol_type = other DNA
aaaatggctccaccggtgttatatcacgtgtaaacaaacaggtg

SEQ ID NO: 1958 - DNA, 44 bp, synthetic construct
  misc_feature 1..44: note = oligonucleotide decoy
  source 1..44: mol_type = other DNA
aaaatggctccaccggtgttatatcacgtgtaaataaacaggtg

SEQ ID NO: 1959 - DNA, 44 bp, synthetic construct
  misc_feature 1..44: note = oligonucleotide decoy
  source 1..44: mol_type = other DNA
aaaatggctccaccggtgttatgtcacgtgtaaacaaacaggtg

SEQ ID NO: 1960 - DNA, 44 bp, synthetic construct
  misc_feature 1..44: note = oligonucleotide decoy
  source 1..44: mol_type = other DNA
aaaatggctccaccggtgttatgtcacgtgtaaataaacaggtg

SEQ ID NO: 1961 - DNA, 44 bp, synthetic construct
  misc_feature 1..44: note = oligonucleotide decoy
  source 1..44: mol_type = other DNA
aaaatggctccaccgttgttacatcacgtgtaaacaaacaggtg

SEQ ID NO: 1962 - DNA, 44 bp, synthetic construct
  misc_feature 1..44: note = oligonucleotide decoy
  source 1..44: mol_type = other DNA
aaaatggctccaccgttgttacatcacgtgtaaataaacaggtg

SEQ ID NO: 1963 - DNA, 44 bp, synthetic construct
  misc_feature 1..44: note = oligonucleotide decoy
  source 1..44: mol_type = other DNA
aaaatggctccaccgttgttacgtcacgtgtaaacaaacaggtg

SEQ ID NO: 1964 - DNA, 44 bp, synthetic construct
  misc_feature 1..44: note = oligonucleotide decoy
  source 1..44: mol_type = other DNA
aaaatggctccaccgttgttacgtcacgtgtaaataaacaggtg

SEQ ID NO: 1965 - DNA, 44 bp, synthetic construct
  misc_feature 1..44: note = oligonucleotide decoy
  source 1..44: mol_type = other DNA
aaaatggctccaccgttgttatatcacgtgtaaacaaacaggtg

SEQ ID NO: 1966 - DNA, 44 bp, synthetic construct
  misc_feature 1..44: note = oligonucleotide decoy
  source 1..44: mol_type = other DNA
aaaatggctccaccgttgttatatcacgtgtaaataaacaggtg

SEQ ID NO: 1967 - DNA, 44 bp, synthetic construct
  misc_feature 1..44: note = oligonucleotide decoy
  source 1..44: mol_type = other DNA
aaaatggctccaccgttgttatgtcacgtgtaaacaaacaggtg

SEQ ID NO: 1968 - DNA, 44 bp, synthetic construct
  misc_feature 1..44: note = oligonucleotide decoy
  source 1..44: mol_type = other DNA
aaaatggctccaccgttgttatgtcacgtgtaaataaacaggtg

SEQ ID NO: 1969 - DNA, 44 bp, synthetic construct
  misc_feature 1..44: note = oligonucleotide decoy
  source 1..44: mol_type = other DNA
cacctgtttatttacacgtgacataacaacgatggagccatctt

SEQ ID NO: 1970 - DNA, 44 bp, synthetic construct
  misc_feature 1..44: note = oligonucleotide decoy
  source 1..44: mol_type = other DNA
cacctgtttatttacacgtgacataacaccgatggagccatctt

SEQ ID NO: 1971 - DNA, 44 bp, synthetic construct
  misc_feature 1..44: note = oligonucleotide decoy
  source 1..44: mol_type = other DNA
cacctgtttatttacacgtgacataacagcgatggagccatctt

SEQ ID NO: 1972 - DNA, 44 bp, synthetic construct
  misc_feature 1..44: note = oligonucleotide decoy
  source 1..44: mol_type = other DNA
cacctgtttatttacacgtgacataacatcgatggagccatctt

SEQ ID NO: 1973 - DNA, 44 bp, synthetic construct
  misc_feature 1..44: note = oligonucleotide decoy
  source 1..44: mol_type = other DNA
cacctgtttatttacacgtgacgtaacaacgatggagccatctt

SEQ ID NO: 1974 - DNA, 44 bp, synthetic construct
  misc_feature 1..44: note = oligonucleotide decoy
  source 1..44: mol_type = other DNA
cacctgtttatttacacgtgacgtaacaccgatggagccatctt

SEQ ID NO: 1975 - DNA, 44 bp, synthetic construct
  misc_feature 1..44: note = oligonucleotide decoy
  source 1..44: mol_type = other DNA
cacctgtttatttacacgtgacgtaacagcgatggagccatctt

SEQ ID NO: 1976 - DNA, 44 bp, synthetic construct
  misc_feature 1..44: note = oligonucleotide decoy
  source 1..44: mol_type = other DNA
cacctgtttatttacacgtgacgtaacatcgatggagccatctt

SEQ ID NO: 1977 - DNA, 44 bp, synthetic construct
  misc_feature 1..44: note = oligonucleotide decoy
  source 1..44: mol_type = other DNA
cacctgtttatttacacgtgatataacaacgatggagccatctt

SEQ ID NO: 1978 - DNA, 44 bp, synthetic construct
  misc_feature 1..44: note = oligonucleotide decoy
  source 1..44: mol_type = other DNA
cacctgtttatttacacgtgatataacaccgatggagccatctt

SEQ ID NO: 1979 - DNA, 44 bp, synthetic construct
  misc_feature 1..44: note = oligonucleotide decoy
  source 1..44: mol_type = other DNA
cacctgtttatttacacgtgatataacagcgatggagccatctt

SEQ ID NO: 1980 - DNA, 44 bp, synthetic construct
  misc_feature 1..44: note = oligonucleotide decoy
  source 1..44: mol_type = other DNA
cacctgtttatttacacgtgatataacatcgatggagccatctt

SEQ ID NO: 1981 - DNA, 44 bp, synthetic construct
  misc_feature 1..44: note = oligonucleotide decoy
  source 1..44: mol_type = other DNA
cacctgtttatttacacgtgatgtaacaacgatggagccatctt

SEQ ID NO: 1982 - DNA, 44 bp, synthetic construct
  misc_feature 1..44: note = oligonucleotide decoy
  source 1..44: mol_type = other DNA
cacctgtttatttacacgtgatgtaacaccgatggagccatctt

SEQ ID NO: 1983 - DNA, 44 bp, synthetic construct
  misc_feature 1..44: note = oligonucleotide decoy
  source 1..44: mol_type = other DNA
cacctgtttatttacacgtgatgtaacagcgatggagccatctt

SEQ ID NO: 1984 - DNA, 44 bp, synthetic construct
  misc_feature 1..44: note = oligonucleotide decoy
  source 1..44: mol_type = other DNA
cacctgtttatttacacgtgatgtaacatcgatggagccatctt

SEQ ID NO: 1985 - DNA, 44 bp, synthetic construct
  misc_feature 1..44: note = oligonucleotide decoy
  source 1..44: mol_type = other DNA
cacctgtttgtttacacgtgacataacaacgatggagccatctt

SEQ ID NO: 1986 - DNA, 44 bp, synthetic construct
  misc_feature 1..44: note = oligonucleotide decoy
  source 1..44: mol_type = other DNA
cacctgtttgtttacacgtgacataacaccgatggagccatctt

SEQ ID NO: 1987 - DNA, 44 bp, synthetic construct
  misc_feature 1..44: note = oligonucleotide decoy
  source 1..44: mol_type = other DNA
cacctgtttgtttacacgtgacataacagcgatggagccatctt

SEQ ID NO: 1988 - DNA, 44 bp, synthetic construct
  misc_feature 1..44: note = oligonucleotide decoy
  source 1..44: mol_type = other DNA
cacctgtttgtttacacgtgacataacatcgatggagccatctt

SEQ ID NO: 1989 - DNA, 44 bp, synthetic construct
  misc_feature 1..44: note = oligonucleotide decoy
  source 1..44: mol_type = other DNA
cacctgtttgtttacacgtgacgtaacaacgatggagccatctt

SEQ ID NO: 1990 - DNA, 44 bp, synthetic construct
  misc_feature 1..44: note = oligonucleotide decoy
  source 1..44: mol_type = other DNA
cacctgtttgtttacacgtgacgtaacaccgatggagccatctt

SEQ ID NO: 1991 - DNA, 44 bp, synthetic construct
  misc_feature 1..44: note = oligonucleotide decoy
  source 1..44: mol_type = other DNA
cacctgtttgtttacacgtgacgtaacagcgatggagccatctt

SEQ ID NO: 1992 - DNA, 44 bp, synthetic construct
  misc_feature 1..44: note = oligonucleotide decoy
  source 1..44: mol_type = other DNA
cacctgtttgtttacacgtgacgtaacatcgatggagccatctt

SEQ ID NO: 1993 - DNA, 44 bp, synthetic construct
  misc_feature 1..44: note = oligonucleotide decoy
  source 1..44: mol_type = other DNA
cacctgtttgtttacacgtgatataacaacgatggagccatctt

SEQ ID NO: 1994 - DNA, 44 bp, synthetic construct
  misc_feature 1..44: note = oligonucleotide decoy
  source 1..44: mol_type = other DNA
cacctgtttgtttacacgtgatataacaccgatggagccatctt

SEQ ID NO: 1995 - DNA, 44 bp, synthetic construct
  misc_feature 1..44: note = oligonucleotide decoy
  source 1..44: mol_type = other DNA
cacctgtttgtttacacgtgatataacagcgatggagccatctt

SEQ ID NO: 1996 - DNA, 44 bp, synthetic construct
  misc_feature 1..44: note = oligonucleotide decoy
  source 1..44: mol_type = other DNA
cacctgtttgtttacacgtgatataacatcgatggagccatctt

SEQ ID NO: 1997 - DNA, 44 bp, synthetic construct
  misc_feature 1..44: note = oligonucleotide decoy
  source 1..44: mol_type = other DNA
cacctgtttgtttacacgtgatgtaacaacgatggagccatctt

SEQ ID NO: 1998 - DNA, 44 bp, synthetic construct
  misc_feature 1..44: note = oligonucleotide decoy
  source 1..44: mol_type = other DNA
cacctgtttgtttacacgtgatgtaacaccgatggagccatctt

SEQ ID NO: 1999 - DNA, 44 bp, synthetic construct
  misc_feature 1..44: note = oligonucleotide decoy
  source 1..44: mol_type = other DNA
cacctgtttgtttacacgtgatgtaacagcgatggagccatctt

SEQ ID NO: 2000 - DNA, 44 bp, synthetic construct
  misc_feature 1..44: note = oligonucleotide decoy
  source 1..44: mol_type = other DNA
cacctgtttgtttacacgtgatgtaacatcgatggagccatctt

SEQ ID NO: 2001 - DNA, 44 bp, synthetic construct
  misc_feature 1..44: note = oligonucleotide decoy
  source 1..44: mol_type = other DNA
cacctgtttatttacacgtgacataacaacgatggagccatttt

SEQ ID NO: 2002 - DNA, 44 bp, synthetic construct
  misc_feature 1..44: note = oligonucleotide decoy
  source 1..44: mol_type = other DNA
cacctgtttatttacacgtgacataacaccgatggagccatttt

SEQ ID NO: 2003 - DNA, 44 bp, synthetic construct
  misc_feature 1..44: note = oligonucleotide decoy
  source 1..44: mol_type = other DNA
cacctgtttatttacacgtgacataacagcgatggagccatttt

SEQ ID NO: 2004 - DNA, 44 bp, synthetic construct
  misc_feature 1..44: note = oligonucleotide decoy
  source 1..44: mol_type = other DNA
cacctgtttatttacacgtgacataacatcgatggagccatttt

SEQ ID NO: 2005 - DNA, 44 bp, synthetic construct
  misc_feature 1..44: note = oligonucleotide decoy
  source 1..44: mol_type = other DNA
cacctgtttatttacacgtgacgtaacaacgatggagccatttt

SEQ ID NO: 2006 - DNA, 44 bp, synthetic construct
  misc_feature 1..44: note = oligonucleotide decoy
  source 1..44: mol_type = other DNA
cacctgtttatttacacgtgacgtaacaccgatggagccatttt

SEQ ID NO: 2007 - DNA, 44 bp, synthetic construct
  misc_feature 1..44: note = oligonucleotide decoy
  source 1..44: mol_type = other DNA
cacctgtttatttacacgtgacgtaacagcgatggagccatttt

SEQ ID NO: 2008 - DNA, 44 bp, synthetic construct
  misc_feature 1..44: note = oligonucleotide decoy
  source 1..44: mol_type = other DNA
cacctgtttatttacacgtgacgtaacatcgatggagccatttt

SEQ ID NO: 2009 - DNA, 44 bp, synthetic construct
  misc_feature 1..44: note = oligonucleotide decoy
  source 1..44: mol_type = other DNA
cacctgtttatttacacgtgatataacaacgatggagccatttt

SEQ ID NO: 2010 - DNA, 44 bp, synthetic construct
  misc_feature 1..44: note = oligonucleotide decoy
  source 1..44: mol_type = other DNA
cacctgtttatttacacgtgatataacaccgatggagccatttt

SEQ ID NO: 2011 - DNA, 44 bp, synthetic construct
  misc_feature 1..44: note = oligonucleotide decoy
  source 1..44: mol_type = other DNA
cacctgtttatttacacgtgatataacagcgatggagccatttt

SEQ ID NO: 2012 - DNA, 44 bp, synthetic construct
  misc_feature 1..44: note = oligonucleotide decoy
  source 1..44: mol_type = other DNA
cacctgtttatttacacgtgatataacatcgatggagccatttt

SEQ ID NO: 2013 - DNA, 44 bp, synthetic construct
  misc_feature 1..44: note = oligonucleotide decoy
  source 1..44: mol_type = other DNA
cacctgtttatttacacgtgatgtaacaacgatggagccatttt

SEQ ID NO: 2014 - DNA, 44 bp, synthetic construct
  misc_feature 1..44: note = oligonucleotide decoy
  source 1..44: mol_type = other DNA
cacctgtttatttacacgtgatgtaacaccgatggagccatttt

SEQ ID NO: 2015 - DNA, 44 bp, synthetic construct
  misc_feature 1..44: note = oligonucleotide decoy
  source 1..44: mol_type = other DNA
cacctgtttatttacacgtgatgtaacagcgatggagccatttt

SEQ ID NO: 2016 - DNA, 44 bp, synthetic construct
  misc_feature 1..44: note = oligonucleotide decoy
  source 1..44: mol_type = other DNA
cacctgtttatttacacgtgatgtaacatcgatggagccatttt

SEQ ID NO: 2017 - DNA, 44 bp, synthetic construct
  misc_feature 1..44: note = oligonucleotide decoy
  source 1..44: mol_type = other DNA
cacctgtttgtttacacgtgacataacaacgatggagccatttt

SEQ ID NO: 2018 - DNA, 44 bp, synthetic construct
  misc_feature 1..44: note = oligonucleotide decoy
  source 1..44: mol_type = other DNA
cacctgtttgtttacacgtgacataacaccgatggagccatttt

SEQ ID NO: 2019 - DNA, 44 bp, synthetic construct
  misc_feature 1..44: note = oligonucleotide decoy
  source 1..44: mol_type = other DNA
cacctgtttgtttacacgtgacataacagcgatggagccatttt

SEQ ID NO: 2020 - DNA, 44 bp, synthetic construct
  misc_feature 1..44: note = oligonucleotide decoy
  source 1..44: mol_type = other DNA
cacctgtttgtttacacgtgacataacatcgatggagccatttt

SEQ ID NO: 2021 - DNA, 44 bp, synthetic construct
  misc_feature 1..44: note = oligonucleotide decoy
  source 1..44: mol_type = other DNA
cacctgtttgtttacacgtgacgtaacaacgatggagccatttt

SEQ ID NO: 2022 - DNA, 44 bp, synthetic construct
  misc_feature 1..44: note = oligonucleotide decoy
  source 1..44: mol_type = other DNA
cacctgtttgtttacacgtgacgtaacaccgatggagccatttt

SEQ ID NO: 2023 - DNA, 44 bp, synthetic construct
  misc_feature 1..44: note = oligonucleotide decoy
  source 1..44: mol_type = other DNA
cacctgtttgtttacacgtgacgtaacagcgatggagccatttt

SEQ ID NO: 2024 - DNA, 44 bp, synthetic construct
  misc_feature 1..44: note = oligonucleotide decoy
  source 1..44: mol_type = other DNA
cacctgtttgtttacacgtgacgtaacatcgatggagccatttt

SEQ ID NO: 2025 - DNA, 44 bp, synthetic construct
  misc_feature 1..44: note = oligonucleotide decoy
  source 1..44: mol_type = other DNA
cacctgtttgtttacacgtgatataacaacgatggagccatttt

SEQ ID NO: 2026 - DNA, 44 bp, synthetic construct
  misc_feature 1..44: note = oligonucleotide decoy
  source 1..44: mol_type = other DNA
cacctgtttgtttacacgtgatataacaccgatggagccatttt

SEQ ID NO: 2027 - DNA, 44 bp, synthetic construct
  misc_feature 1..44: note = oligonucleotide decoy
  source 1..44: mol_type = other DNA
cacctgtttgtttacacgtgatataacagcgatggagccatttt

SEQ ID NO: 2028 - DNA, 44 bp, synthetic construct
  misc_feature 1..44: note = oligonucleotide decoy
  source 1..44: mol_type = other DNA
cacctgtttgtttacacgtgatataacatcgatggagccatttt

SEQ ID NO: 2029 - DNA, 44 bp, synthetic construct
  misc_feature 1..44: note = oligonucleotide decoy
  source 1..44: mol_type = other DNA
cacctgtttgtttacacgtgatgtaacaacgatggagccatttt

SEQ ID NO: 2030 - DNA, 44 bp, synthetic construct
  misc_feature 1..44: note = oligonucleotide decoy
  source 1..44: mol_type = other DNA
cacctgtttgtttacacgtgatgtaacaccgatggagccatttt

SEQ ID NO: 2031 - DNA, 44 bp, synthetic construct
  misc_feature 1..44: note = oligonucleotide decoy
  source 1..44: mol_type = other DNA
cacctgtttgtttacacgtgatgtaacagcgatggagccatttt

SEQ ID NO: 2032 - DNA, 44 bp, synthetic construct
  misc_feature 1..44: note = oligonucleotide decoy
  source 1..44: mol_type = other DNA
cacctgtttgtttacacgtgatgtaacatcgatggagccatttt

SEQ ID NO: 2033 - DNA, 44 bp, synthetic construct
  misc_feature 1..44: note = oligonucleotide decoy
  source 1..44: mol_type = other DNA
cacctgtttatttacacgtgacataacaacggtggagccatctt

SEQ ID NO: 2034 - DNA, 44 bp, synthetic construct
  misc_feature 1..44: note = oligonucleotide decoy
  source 1..44: mol_type = other DNA
cacctgtttatttacacgtgacataacaccggtggagccatctt

SEQ ID NO: 2035 - DNA, 44 bp, synthetic construct
  misc_feature 1..44: note = oligonucleotide decoy
  source 1..44: mol_type = other DNA
cacctgtttatttacacgtgacataacagcggtggagccatctt

SEQ ID NO: 2036 - DNA, 44 bp, synthetic construct
  misc_feature 1..44: note = oligonucleotide decoy
  source 1..44: mol_type = other DNA
cacctgtttatttacacgtgacataacatcggtggagccatctt

SEQ ID NO: 2037 - DNA, 44 bp, synthetic construct
  misc_feature 1..44: note = oligonucleotide decoy
  source 1..44: mol_type = other DNA
cacctgtttatttacacgtgacgtaacaacggtggagccatctt

SEQ ID NO: 2038 - DNA, 44 bp, synthetic construct
  misc_feature 1..44: note = oligonucleotide decoy
  source 1..44: mol_type = other DNA
cacctgtttatttacacgtgacgtaacaccggtggagccatctt

SEQ ID NO: 2039 - DNA, 44 bp, synthetic construct
  misc_feature 1..44: note = oligonucleotide decoy
  source 1..44: mol_type = other DNA
cacctgtttatttacacgtgacgtaacagcggtggagccatctt

SEQ ID NO: 2040 - DNA, 44 bp, synthetic construct
  misc_feature 1..44: note = oligonucleotide decoy
  source 1..44: mol_type = other DNA
cacctgtttatttacacgtgacgtaacatcggtggagccatctt

SEQ ID NO: 2041 - DNA, 44 bp, synthetic construct
  misc_feature 1..44: note = oligonucleotide decoy
  source 1..44: mol_type = other DNA
cacctgtttatttacacgtgatataacaacggtggagccatctt

SEQ ID NO: 2042 - DNA, 44 bp, synthetic construct
  misc_feature 1..44: note = oligonucleotide decoy
  source 1..44: mol_type = other DNA
cacctgtttatttacacgtgatataacaccggtggagccatctt

SEQ ID NO: 2043 - DNA, 44 bp, synthetic construct
  misc_feature 1..44: note = oligonucleotide decoy
  source 1..44: mol_type = other DNA
cacctgtttatttacacgtgatataacagcggtggagccatctt

SEQ ID NO: 2044 - DNA, 44 bp, synthetic construct
  misc_feature 1..44: note = oligonucleotide decoy
  source 1..44: mol_type = other DNA
cacctgtttatttacacgtgatataacatcggtggagccatctt

SEQ ID NO: 2045 - DNA, 44 bp, synthetic construct
  misc_feature 1..44: note = oligonucleotide decoy
  source 1..44: mol_type = other DNA
cacctgtttatttacacgtgatgtaacaacggtggagccatctt

SEQ ID NO: 2046 - DNA, 44 bp, synthetic construct
  misc_feature 1..44: note = oligonucleotide decoy
  source 1..44: mol_type = other DNA
cacctgtttatttacacgtgatgtaacaccggtggagccatctt

SEQ ID NO: 2047 - DNA, 44 bp, synthetic construct
  misc_feature 1..44: note = oligonucleotide decoy
  source 1..44: mol_type = other DNA
cacctgtttatttacacgtgatgtaacagcggtggagccatctt

SEQ ID NO: 2048 - DNA, 44 bp, synthetic construct
  misc_feature 1..44: note = oligonucleotide decoy
  source 1..44: mol_type = other DNA
cacctgtttatttacacgtgatgtaacatcggtggagccatctt

SEQ ID NO: 2049 - DNA, 44 bp, synthetic construct
  misc_feature 1..44: note = oligonucleotide decoy
  source 1..44: mol_type = other DNA
cacctgtttgtttacacgtgacataacaacggtggagccatctt

SEQ ID NO: 2050 - DNA, 44 bp, synthetic construct
  misc_feature 1..44: note = oligonucleotide decoy
  source 1..44: mol_type = other DNA
cacctgtttgtttacacgtgacataacaccggtggagccatctt

SEQ ID NO: 2051 - DNA, 44 bp, synthetic construct
  misc_feature 1..44: note = oligonucleotide decoy
  source 1..44: mol_type = other DNA
cacctgtttgtttacacgtgacataacagcggtggagccatctt

SEQ ID NO: 2052 - DNA, 44 bp, synthetic construct
  misc_feature 1..44: note = oligonucleotide decoy
  source 1..44: mol_type = other DNA
cacctgtttgtttacacgtgacataacatcggtggagccatctt

SEQ ID NO: 2053 - DNA, 44 bp, synthetic construct
  misc_feature 1..44: note = oligonucleotide decoy
  source 1..44: mol_type = other DNA
cacctgtttgtttacacgtgacgtaacaacggtggagccatctt

SEQ ID NO: 2054 - DNA, 44 bp, synthetic construct
  misc_feature 1..44: note = oligonucleotide decoy
  source 1..44: mol_type = other DNA
cacctgtttgtttacacgtgacgtaacaccggtggagccatctt

SEQ ID NO: 2055 - DNA, 44 bp, synthetic construct
  misc_feature 1..44: note = oligonucleotide decoy
  source 1..44: mol_type = other DNA
cacctgtttgtttacacgtgacgtaacagcggtggagccatctt

SEQ ID NO: 2056 - DNA, 44 bp, synthetic construct
  misc_feature 1..44: note = oligonucleotide decoy
  source 1..44: mol_type = other DNA
cacctgtttgtttacacgtgacgtaacatcggtggagccatctt

SEQ ID NO: 2057 - DNA, 44 bp, synthetic construct
  misc_feature 1..44: note = oligonucleotide decoy
  source 1..44: mol_type = other DNA
cacctgtttgtttacacgtgatataacaacggtggagccatctt

SEQ ID NO: 2058 - DNA, 44 bp, synthetic construct
  misc_feature 1..44: note = oligonucleotide decoy
  source 1..44: mol_type = other DNA
cacctgtttgtttacacgtgatataacaccggtggagccatctt

SEQ ID NO: 2059 - DNA, 44 bp, synthetic construct
  misc_feature 1..44: note = oligonucleotide decoy
  source 1..44: mol_type = other DNA
cacctgtttgtttacacgtgatataacagcggtggagccatctt

SEQ ID NO: 2060 - DNA, 44 bp, synthetic construct
  misc_feature 1..44: note = oligonucleotide decoy
  source 1..44: mol_type = other DNA
cacctgtttgtttacacgtgatataacatcggtggagccatctt

SEQ ID NO: 2061 - DNA, 44 bp, synthetic construct
  misc_feature 1..44: note = oligonucleotide decoy
  source 1..44: mol_type = other DNA
cacctgtttgtttacacgtgatgtaacaacggtggagccatctt

SEQ ID NO: 2062 - DNA, 44 bp, synthetic construct
  misc_feature 1..44: note = oligonucleotide decoy
  source 1..44: mol_type = other DNA
cacctgtttgtttacacgtgatgtaacaccggtggagccatctt

SEQ ID NO: 2063 - DNA, 44 bp, synthetic construct
  misc_feature 1..44: note = oligonucleotide decoy
  source 1..44: mol_type = other DNA
cacctgtttgtttacacgtgatgtaacagcggtggagccatctt

SEQ ID NO: 2064 - DNA, 44 bp, synthetic construct
  misc_feature 1..44: note = oligonucleotide decoy
  source 1..44: mol_type = other DNA
cacctgtttgtttacacgtgatgtaacatcggtggagccatctt

SEQ ID NO: 2065 - DNA, 44 bp, synthetic construct
  misc_feature 1..44: note = oligonucleotide decoy
  source 1..44: mol_type = other DNA
cacctgtttatttacacgtgacataacaacggtggagccatttt

SEQ ID NO: 2066 - DNA, 44 bp, synthetic construct
  misc_feature 1..44: note = oligonucleotide decoy
  source 1..44: mol_type = other DNA
cacctgtttatttacacgtgacataacaccggtggagccatttt

SEQ ID NO: 2067 - DNA, 44 bp, synthetic construct
  misc_feature 1..44: note = oligonucleotide decoy
  source 1..44: mol_type = other DNA
cacctgtttatttacacgtgacataacagcggtggagccatttt

SEQ ID NO: 2068 - DNA, 44 bp, synthetic construct
  misc_feature 1..44: note = oligonucleotide decoy
  source 1..44: mol_type = other DNA
cacctgtttatttacacgtgacataacatcggtggagccatttt

SEQ ID NO: 2069 - DNA, 44 bp, synthetic construct
  misc_feature 1..44: note = oligonucleotide decoy
  source 1..44: mol_type = other DNA
cacctgtttatttacacgtgacgtaacaacggtggagccatttt

SEQ ID NO: 2070 - DNA, 44 bp, synthetic construct
  misc_feature 1..44: note = oligonucleotide decoy
  source 1..44: mol_type = other DNA
cacctgtttatttacacgtgacgtaacaccggtggagccatttt

SEQ ID NO: 2071 - DNA, 44 bp, synthetic construct
  misc_feature 1..44: note = oligonucleotide decoy
  source 1..44: mol_type = other DNA
cacctgtttatttacacgtgacgtaacagcggtggagccatttt

SEQ ID NO: 2072 - DNA, 44 bp, synthetic construct
  misc_feature 1..44: note = oligonucleotide decoy
  source 1..44: mol_type = other DNA
cacctgtttatttacacgtgacgtaacatcggtggagccatttt

SEQ ID NO: 2073 - DNA, 44 bp, synthetic construct
  misc_feature 1..44: note = oligonucleotide decoy
  source 1..44: mol_type = other DNA
cacctgtttatttacacgtgatataacaacggtggagccatttt

SEQ ID NO: 2074 - DNA, 44 bp, synthetic construct
  misc_feature 1..44: note = oligonucleotide decoy
  source 1..44: mol_type = other DNA
cacctgtttatttacacgtgatataacaccggtggagccatttt

SEQ ID NO: 2075 - DNA, 44 bp, synthetic construct
  misc_feature 1..44: note = oligonucleotide decoy
  source 1..44: mol_type = other DNA
cacctgtttatttacacgtgatataacagcggtggagccatttt

SEQ ID NO: 2076 - DNA, 44 bp, synthetic construct
  misc_feature 1..44: note = oligonucleotide decoy
  source 1..44: mol_type = other DNA
cacctgtttatttacacgtgatataacatcggtggagccatttt

SEQ ID NO: 2077 - DNA, 44 bp, synthetic construct
  misc_feature 1..44: note = oligonucleotide decoy
  source 1..44: mol_type = other DNA
cacctgtttatttacacgtgatgtaacaacggtggagccatttt

SEQ ID NO: 2078 - DNA, 44 bp, synthetic construct
  misc_feature 1..44: note = oligonucleotide decoy
  source 1..44: mol_type = other DNA
cacctgtttatttacacgtgatgtaacaccggtggagccatttt

SEQ ID NO: 2079 - DNA, 44 bp, synthetic construct
  misc_feature 1..44: note = oligonucleotide decoy
  source 1..44: mol_type = other DNA
cacctgtttatttacacgtgatgtaacagcggtggagccatttt

SEQ ID NO: 2080 - DNA, 44 bp, synthetic construct
  misc_feature 1..44: note = oligonucleotide decoy
  source 1..44: mol_type = other DNA
cacctgtttatttacacgtgatgtaacatcggtggagccatttt

SEQ ID NO: 2081 - DNA, 44 bp, synthetic construct
  misc_feature 1..44: note = oligonucleotide decoy
  source 1..44: mol_type = other DNA
cacctgtttgtttacacgtgacataacaacggtggagccatttt

SEQ ID NO: 2082 - DNA, 44 bp, synthetic construct
  misc_feature 1..44: note = oligonucleotide decoy
  source 1..44: mol_type = other DNA
cacctgtttgtttacacgtgacataacaccggtggagccatttt

SEQ ID NO: 2083 - DNA, 44 bp, synthetic construct
  misc_feature 1..44: note = oligonucleotide decoy
  source 1..44: mol_type = other DNA
cacctgtttgtttacacgtgacataacagcggtggagccatttt

SEQ ID NO: 2084 - DNA, 44 bp, synthetic construct
  misc_feature 1..44: note = oligonucleotide decoy
  source 1..44: mol_type = other DNA
cacctgtttgtttacacgtgacataacatcggtggagccatttt

SEQ ID NO: 2085 - DNA, 44 bp, synthetic construct
  misc_feature 1..44: note = oligonucleotide decoy
  source 1..44: mol_type = other DNA
cacctgtttgtttacacgtgacgtaacaacggtggagccatttt

SEQ ID NO: 2086 - DNA, 44 bp, synthetic construct
  misc_feature 1..44: note = oligonucleotide decoy
  source 1..44: mol_type = other DNA
cacctgtttgtttacacgtgacgtaacaccggtggagccatttt

SEQ ID NO: 2087 - DNA, 44 bp, synthetic construct
  misc_feature 1..44: note = oligonucleotide decoy
  source 1..44: mol_type = other DNA
cacctgtttgtttacacgtgacgtaacagcggtggagccatttt

SEQ ID NO: 2088 - DNA, 44 bp, synthetic construct
  misc_feature 1..44: note = oligonucleotide decoy
  source 1..44: mol_type = other DNA
cacctgtttgtttacacgtgacgtaacatcggtggagccatttt

SEQ ID NO: 2089 - DNA, 44 bp, synthetic construct
  misc_feature 1..44: note = oligonucleotide decoy
  source 1..44: mol_type = other DNA
cacctgtttgtttacacgtgatataacaacggtggagccatttt

SEQ ID NO: 2090 - DNA, 44 bp, synthetic construct
  misc_feature 1..44: note = oligonucleotide decoy
  source 1..44: mol_type = other DNA
cacctgtttgtttacacgtgatataacaccggtggagccatttt

SEQ ID NO: 2091 - DNA, 44 bp, synthetic construct
  misc_feature 1..44: note = oligonucleotide decoy
  source 1..44: mol_type = other DNA
cacctgtttgtttacacgtgatataacagcggtggagccatttt

SEQ ID NO: 2092 - DNA, 44 bp, synthetic construct
  misc_feature 1..44: note = oligonucleotide decoy
  source 1..44: mol_type = other DNA
cacctgtttgtttacacgtgatataacatcggtggagccatttt

SEQ ID NO: 2093 - DNA, 44 bp, synthetic construct
  misc_feature 1..44: note = oligonucleotide decoy
  source 1..44: mol_type = other DNA
cacctgtttgtttacacgtgatgtaacaacggtggagccatttt

SEQ ID NO: 2094 - DNA, 44 bp, synthetic construct
  misc_feature 1..44: note = oligonucleotide decoy
  source 1..44: mol_type = other DNA
cacctgtttgtttacacgtgatgtaacaccggtggagccatttt

SEQ ID NO: 2095 - DNA, 44 bp, synthetic construct
  misc_feature 1..44: note = oligonucleotide decoy
  source 1..44: mol_type = other DNA
cacctgtttgtttacacgtgatgtaacagcggtggagccatttt

SEQ ID NO: 2096 - DNA, 44 bp, synthetic construct
  misc_feature 1..44: note = oligonucleotide decoy
  source 1..44: mol_type = other DNA
cacctgtttgtttacacgtgatgtaacatcggtggagccatttt

SEQ ID NO: 2097 - DNA, 44 bp, synthetic construct
  misc_feature 1..44: note = oligonucleotide decoy
  source 1..44: mol_type = other DNA
caggtgtttatttacacgtgacataacaacgatggagccatctt

SEQ ID NO: 2098 - DNA, 44 bp, synthetic construct
  misc_feature 1..44: note = oligonucleotide decoy
  source 1..44: mol_type = other DNA
caggtgtttatttacacgtgacataacaccgatggagccatctt

SEQ ID NO: 2099 - DNA, 44 bp, synthetic construct
  misc_feature 1..44: note = oligonucleotide decoy
  source 1..44: mol_type = other DNA
caggtgtttatttacacgtgacataacagcgatggagccatctt

SEQ ID NO: 2100 - DNA, 44 bp, synthetic construct
  misc_feature 1..44: note = oligonucleotide decoy
  source 1..44: mol_type = other DNA
caggtgtttatttacacgtgacataacatcgatggagccatctt

SEQ ID NO: 2101 - DNA, 44 bp, synthetic construct
  misc_feature 1..44: note = oligonucleotide decoy
  source 1..44: mol_type = other DNA
caggtgtttatttacacgtgacgtaacaacgatggagccatctt

SEQ ID NO: 2102 - DNA, 44 bp, synthetic construct
  misc_feature 1..44: note = oligonucleotide decoy
  source 1..44: mol_type = other DNA
caggtgtttatttacacgtgacgtaacaccgatggagccatctt

SEQ ID NO: 2103 - DNA, 44 bp, synthetic construct
  misc_feature 1..44: note = oligonucleotide decoy
  source 1..44: mol_type = other DNA
caggtgtttatttacacgtgacgtaacagcgatggagccatctt

SEQ ID NO: 2104 - DNA, 44 bp, synthetic construct
  misc_feature 1..44: note = oligonucleotide decoy
  source 1..44: mol_type = other DNA
caggtgtttatttacacgtgacgtaacatcgatggagccatctt

SEQ ID NO: 2105 - DNA, 44 bp, synthetic construct
  misc_feature 1..44: note = oligonucleotide decoy
  source 1..44: mol_type = other DNA
caggtgtttatttacacgtgatataacaacgatggagccatctt

SEQ ID NO: 2106 - DNA, 44 bp, synthetic construct
  misc_feature 1..44: note = oligonucleotide decoy
  source 1..44: mol_type = other DNA
caggtgtttatttacacgtgatataacaccgatggagccatctt

SEQ ID NO: 2107 - DNA, 44 bp, synthetic construct
  misc_feature 1..44: note = oligonucleotide decoy
  source 1..44: mol_type = other DNA
caggtgtttatttacacgtgatataacagcgatggagccatctt

SEQ ID NO: 2108 - DNA, 44 bp, synthetic construct
  misc_feature 1..44: note = oligonucleotide decoy
  source 1..44: mol_type = other DNA
caggtgtttatttacacgtgatataacatcgatggagccatctt

SEQ ID NO: 2109 - DNA, 44 bp, synthetic construct
  misc_feature 1..44: note = oligonucleotide decoy
  source 1..44: mol_type = other DNA
caggtgtttatttacacgtgatgtaacaacgatggagccatctt

SEQ ID NO: 2110 - DNA, 44 bp, synthetic construct
  misc_feature 1..44: note = oligonucleotide decoy
  source 1..44: mol_type = other DNA
caggtgtttatttacacgtgatgtaacaccgatggagccatctt

SEQ ID NO: 2111 - DNA, 44 bp, synthetic construct
  misc_feature 1..44: note = oligonucleotide decoy
  source 1..44: mol_type = other DNA
caggtgtttatttacacgtgatgtaacagcgatggagccatctt

SEQ ID NO: 2112 - DNA, 44 bp, synthetic construct
  misc_feature 1..44: note = oligonucleotide decoy
  source 1..44: mol_type = other DNA
caggtgtttatttacacgtgatgtaacatcgatggagccatctt

SEQ ID NO: 2113 - DNA, 44 bp, synthetic construct
  misc_feature 1..44: note = oligonucleotide decoy
  source 1..44: mol_type = other DNA
caggtgtttgtttacacgtgacataacaacgatggagccatctt

SEQ ID NO: 2114 - DNA, 44 bp, synthetic construct
  misc_feature 1..44: note = oligonucleotide decoy
  source 1..44: mol_type = other DNA
caggtgtttgtttacacgtgacataacaccgatggagccatctt

SEQ ID NO: 2115 - DNA, 44 bp, synthetic construct
  misc_feature 1..44: note = oligonucleotide decoy
  source 1..44: mol_type = other DNA
caggtgtttgtttacacgtgacataacagcgatggagccatctt

SEQ ID NO: 2116 - DNA, 44 bp, synthetic construct
  misc_feature 1..44: note = oligonucleotide decoy
  source 1..44: mol_type = other DNA
caggtgtttgtttacacgtgacataacatcgatggagccatctt

SEQ ID NO: 2117 - DNA, 44 bp, synthetic construct
  misc_feature 1..44: note = oligonucleotide decoy
  source 1..44: mol_type = other DNA
caggtgtttgtttacacgtgacgtaacaacgatggagccatctt

SEQ ID NO: 2118 - DNA, 44 bp, synthetic construct
  misc_feature 1..44: note = oligonucleotide decoy
  source 1..44: mol_type = other DNA
caggtgtttgtttacacgtgacgtaacaccgatggagccatctt

SEQ ID NO: 2119 - DNA, 44 bp, synthetic construct
  misc_feature 1..44: note = oligonucleotide decoy
  source 1..44: mol_type = other DNA
caggtgtttgtttacacgtgacgtaacagcgatggagccatctt

SEQ ID NO: 2120 - DNA, 44 bp, synthetic construct
  misc_feature 1..44: note = oligonucleotide decoy
  source 1..44: mol_type = other DNA
caggtgtttgtttacacgtgacgtaacatcgatggagccatctt

SEQ ID NO: 2121 - DNA, 44 bp, synthetic construct
  misc_feature 1..44: note = oligonucleotide decoy
  source 1..44: mol_type = other DNA
caggtgtttgtttacacgtgatataacaacgatggagccatctt

SEQ ID NO: 2122 - DNA, 44 bp, synthetic construct
  misc_feature 1..44: note = oligonucleotide decoy
  source 1..44: mol_type = other DNA
caggtgtttgtttacacgtgatataacaccgatggagccatctt

SEQ ID NO: 2123 - DNA, 44 bp, synthetic construct
  misc_feature 1..44: note = oligonucleotide decoy
  source 1..44: mol_type = other DNA
caggtgtttgtttacacgtgatataacagcgatggagccatctt

SEQ ID NO: 2124 - DNA, 44 bp, synthetic construct
  misc_feature 1..44: note = oligonucleotide decoy
  source 1..44: mol_type = other DNA
caggtgtttgtttacacgtgatataacatcgatggagccatctt

SEQ ID NO: 2125 - DNA, 44 bp, synthetic construct
  misc_feature 1..44: note = oligonucleotide decoy
  source 1..44: mol_type = other DNA
caggtgtttgtttacacgtgatgtaacaacgatggagccatctt

SEQ ID NO: 2126 - DNA, 44 bp, synthetic construct
  misc_feature 1..44: note = oligonucleotide decoy
  source 1..44: mol_type = other DNA
caggtgtttgtttacacgtgatgtaacaccgatggagccatctt

SEQ ID NO: 2127 - DNA, 44 bp, synthetic construct
  misc_feature 1..44: note = oligonucleotide decoy
  source 1..44: mol_type = other DNA
caggtgtttgtttacacgtgatgtaacagcgatggagccatctt

SEQ ID NO: 2128 - DNA, 44 bp, synthetic construct
  misc_feature 1..44: note = oligonucleotide decoy
  source 1..44: mol_type = other DNA
caggtgtttgtttacacgtgatgtaacatcgatggagccatctt

SEQ ID NO: 2129 - DNA, 44 bp, synthetic construct
  misc_feature 1..44: note = oligonucleotide decoy
  source 1..44: mol_type = other DNA
caggtgtttatttacacgtgacataacaacgatggagccatttt

SEQ ID NO: 2130 - DNA, 44 bp, synthetic construct
  misc_feature 1..44: note = oligonucleotide decoy
  source 1..44: mol_type = other DNA
caggtgtttatttacacgtgacataacaccgatggagccatttt

SEQ ID NO: 2131 - DNA, 44 bp, synthetic construct
  misc_feature 1..44: note = oligonucleotide decoy
  source 1..44: mol_type = other DNA
caggtgtttatttacacgtgacataacagcgatggagccatttt

SEQ ID NO: 2132 - DNA, 44 bp, synthetic construct
  misc_feature 1..44: note = oligonucleotide decoy
  source 1..44: mol_type = other DNA
caggtgtttatttacacgtgacataacatcgatggagccatttt

SEQ ID NO: 2133 - DNA, 44 bp, synthetic construct
  misc_feature 1..44: note = oligonucleotide decoy
  source 1..44: mol_type = other DNA
caggtgtttatttacacgtgacgtaacaacgatggagccatttt

SEQ ID NO: 2134 - DNA, 44 bp, synthetic construct
  misc_feature 1..44: note = oligonucleotide decoy
  source 1..44: mol_type = other DNA
caggtgtttatttacacgtgacgtaacaccgatggagccatttt

SEQ ID NO: 2135 - DNA, 44 bp, synthetic construct
  misc_feature 1..44: note = oligonucleotide decoy
  source 1..44: mol_type = other DNA
caggtgtttatttacacgtgacgtaacagcgatggagccatttt

SEQ ID NO: 2136 - DNA, 44 bp, synthetic construct
  misc_feature 1..44: note = oligonucleotide decoy
  source 1..44: mol_type = other DNA
caggtgtttatttacacgtgacgtaacatcgatggagccatttt

SEQ ID NO: 2137 - DNA, 44 bp, synthetic construct
  misc_feature 1..44: note = oligonucleotide decoy
  source 1..44: mol_type = other DNA
caggtgtttatttacacgtgatataacaacgatggagccatttt

SEQ ID NO: 2138 - DNA, 44 bp, synthetic construct
  misc_feature 1..44: note = oligonucleotide decoy
  source 1..44: mol_type = other DNA
caggtgtttatttacacgtgatataacaccgatggagccatttt

SEQ ID NO: 2139 - DNA, 44 bp, synthetic construct
  misc_feature 1..44: note = oligonucleotide decoy
  source 1..44: mol_type = other DNA
caggtgtttatttacacgtgatataacagcgatggagccatttt

SEQ ID NO: 2140 - DNA, 44 bp, synthetic construct
  misc_feature 1..44: note = oligonucleotide decoy
  source 1..44: mol_type = other DNA
caggtgtttatttacacgtgatataacatcgatggagccatttt

SEQ ID NO: 2141 - DNA, 44 bp, synthetic construct
  misc_feature 1..44: note = oligonucleotide decoy
  source 1..44: mol_type = other DNA
caggtgtttatttacacgtgatgtaacaacgatggagccatttt

SEQ ID NO: 2142 - DNA, 44 bp, synthetic construct
  misc_feature 1..44: note = oligonucleotide decoy
  source 1..44: mol_type = other DNA
caggtgtttatttacacgtgatgtaacaccgatggagccatttt

SEQ ID NO: 2143 - DNA, 44 bp, synthetic construct
  misc_feature 1..44: note = oligonucleotide decoy
  source 1..44: mol_type = other DNA
caggtgtttatttacacgtgatgtaacagcgatggagccatttt

SEQ ID NO: 2144 - DNA, 44 bp, synthetic construct
  misc_feature 1..44: note = oligonucleotide decoy
  source 1..44: mol_type = other DNA
caggtgtttatttacacgtgatgtaacatcgatggagccatttt

SEQ ID NO: 2145 - DNA, 44 bp, synthetic construct
  misc_feature 1..44: note = oligonucleotide decoy
  source 1..44: mol_type = other DNA
caggtgtttgtttacacgtgacataacaacgatggagccatttt

SEQ ID NO: 2146 - DNA, 44 bp, synthetic construct
  misc_feature 1..44: note = oligonucleotide decoy
  source 1..44: mol_type = other DNA
caggtgtttgtttacacgtgacataacaccgatggagccatttt

SEQ ID NO: 2147 - DNA, 44 bp, synthetic construct
  misc_feature 1..44: note = oligonucleotide decoy
  source 1..44: mol_type = other DNA
caggtgtttgtttacacgtgacataacagcgatggagccatttt

SEQ ID NO: 2148 - DNA, 44 bp, synthetic construct
  misc_feature 1..44: note = oligonucleotide decoy
  source 1..44: mol_type = other DNA
caggtgtttgtttacacgtgacataacatcgatggagccatttt

SEQ ID NO: 2149 - DNA, 44 bp, synthetic construct
  misc_feature 1..44: note = oligonucleotide decoy
  source 1..44: mol_type = other DNA
caggtgtttgtttacacgtgacgtaacaacgatggagccatttt

SEQ ID NO: 2150 - DNA, 44 bp, synthetic construct
  misc_feature 1..44: note = oligonucleotide decoy
  source 1..44: mol_type = other DNA
caggtgtttgtttacacgtgacgtaacaccgatggagccatttt

SEQ ID NO: 2151 - DNA, 44 bp, synthetic construct
  misc_feature 1..44: note = oligonucleotide decoy
  source 1..44: mol_type = other DNA
caggtgtttgtttacacgtgacgtaacagcgatggagccatttt

SEQ ID NO: 2152 - DNA, 44 bp, synthetic construct
  misc_feature 1..44: note = oligonucleotide decoy
  source 1..44: mol_type = other DNA
caggtgtttgtttacacgtgacgtaacatcgatggagccatttt

SEQ ID NO: 2153 - DNA, 44 bp, synthetic construct
  misc_feature 1..44: note = oligonucleotide decoy
  source 1..44: mol_type = other DNA
caggtgtttgtttacacgtgatataacaacgatggagccatttt

SEQ ID NO: 2154 - DNA, 44 bp, synthetic construct
  misc_feature 1..44: note = oligonucleotide decoy
  source 1..44: mol_type = other DNA
caggtgtttgtttacacgtgatataacaccgatggagccatttt

SEQ ID NO: 2155 - DNA, 44 bp, synthetic construct
  misc_feature 1..44: note = oligonucleotide decoy
  source 1..44: mol_type = other DNA
caggtgtttgtttacacgtgatataacagcgatggagccatttt

SEQ ID NO: 2156 - DNA, 44 bp, synthetic construct
  misc_feature 1..44: note = oligonucleotide decoy
  source 1..44: mol_type = other DNA
caggtgtttgtttacacgtgatataacatcgatggagccatttt

SEQ ID NO: 2157 - DNA, 44 bp, synthetic construct
  misc_feature 1..44: note = oligonucleotide decoy
  source 1..44: mol_type = other DNA
caggtgtttgtttacacgtgatgtaacaacgatggagccatttt

SEQ ID NO: 2158 - DNA, 44 bp, synthetic construct
  misc_feature 1..44: note = oligonucleotide decoy
  source 1..44: mol_type = other DNA
caggtgtttgtttacacgtgatgtaacaccgatggagccatttt

SEQ ID NO: 2159 - DNA, 44 bp, synthetic construct
  misc_feature 1..44: note = oligonucleotide decoy
  source 1..44: mol_type = other DNA
caggtgtttgtttacacgtgatgtaacagcgatggagccatttt

SEQ ID NO: 2160 - DNA, 44 bp, synthetic construct
  misc_feature 1..44: note = oligonucleotide decoy
  source 1..44: mol_type = other DNA
caggtgtttgtttacacgtgatgtaacatcgatggagccatttt

SEQ ID NO: 2161 - DNA, 44 bp, synthetic construct
  misc_feature 1..44: note = oligonucleotide decoy
  source 1..44: mol_type = other DNA
caggtgtttatttacacgtgacataacaacggtggagccatctt

SEQ ID NO: 2162 - DNA, 44 bp, synthetic construct
  misc_feature 1..44: note = oligonucleotide decoy
  source 1..44: mol_type = other DNA
caggtgtttatttacacgtgacataacaccggtggagccatctt

SEQ ID NO: 2163 - DNA, 44 bp, synthetic construct
  misc_feature 1..44: note = oligonucleotide decoy
  source 1..44: mol_type = other DNA
caggtgtttatttacacgtgacataacagcggtggagccatctt

SEQ ID NO: 2164 - DNA, 44 bp, synthetic construct
  misc_feature 1..44: note = oligonucleotide decoy
  source 1..44: mol_type = other DNA
caggtgtttatttacacgtgacataacatcggtggagccatctt

SEQ ID NO: 2165 - DNA, 44 bp, synthetic construct
  misc_feature 1..44: note = oligonucleotide decoy
  source 1..44: mol_type = other DNA
caggtgtttatttacacgtgacgtaacaacggtggagccatctt

SEQ ID NO: 2166 - DNA, 44 bp, synthetic construct
  misc_feature 1..44: note = oligonucleotide decoy
  source 1..44: mol_type = other DNA
caggtgtttatttacacgtgacgtaacaccggtggagccatctt

SEQ ID NO: 2167 - DNA, 44 bp, synthetic construct
  misc_feature 1..44: note = oligonucleotide decoy
  source 1..44: mol_type = other DNA
caggtgtttatttacacgtgacgtaacagcggtggagccatctt

SEQ ID NO: 2168 - DNA, 44 bp, synthetic construct
  misc_feature 1..44: note = oligonucleotide decoy
  source 1..44: mol_type = other DNA
caggtgtttatttacacgtgacgtaacatcggtggagccatctt

SEQ ID NO: 2169 - DNA, 44 bp, synthetic construct
  misc_feature 1..44: note = oligonucleotide decoy
  source 1..44: mol_type = other DNA
caggtgtttatttacacgtgatataacaacggtggagccatctt

SEQ ID NO: 2170 - DNA, 44 bp, synthetic construct
  misc_feature 1..44: note = oligonucleotide decoy
  source 1..44: mol_type = other DNA
caggtgtttatttacacgtgatataacaccggtggagccatctt

SEQ ID NO: 2171 - DNA, 44 bp, synthetic construct
  misc_feature 1..44: note = oligonucleotide decoy
  source 1..44: mol_type = other DNA
caggtgtttatttacacgtgatataacagcggtggagccatctt

SEQ ID NO: 2172 - DNA, 44 bp, synthetic construct
  misc_feature 1..44: note = oligonucleotide decoy
  source 1..44: mol_type = other DNA
caggtgtttatttacacgtgatataacatcggtggagccatctt

SEQ ID NO: 2173 - DNA, 44 bp, synthetic construct
  misc_feature 1..44: note = oligonucleotide decoy
  source 1..44: mol_type = other DNA
caggtgtttatttacacgtgatgtaacaacggtggagccatctt

SEQ ID NO: 2174 - DNA, 44 bp, synthetic construct
  misc_feature 1..44: note = oligonucleotide decoy
  source 1..44: mol_type = other DNA
caggtgtttatttacacgtgatgtaacaccggtggagccatctt

SEQ ID NO: 2175 - DNA, 44 bp, synthetic construct
  misc_feature 1..44: note = oligonucleotide decoy
  source 1..44: mol_type = other DNA
caggtgtttatttacacgtgatgtaacagcggtggagccatctt

SEQ ID NO: 2176 - DNA, 44 bp, synthetic construct
  misc_feature 1..44: note = oligonucleotide decoy
  source 1..44: mol_type = other DNA
caggtgtttatttacacgtgatgtaacatcggtggagccatctt

SEQ ID NO: 2177 - DNA, 44 bp, synthetic construct
  misc_feature 1..44: note = oligonucleotide decoy
  source 1..44: mol_type = other DNA
caggtgtttgtttacacgtgacataacaacggtggagccatctt

SEQ ID NO: 2178 - DNA, 44 bp, synthetic construct
  misc_feature 1..44: note = oligonucleotide decoy
  source 1..44: mol_type = other DNA
caggtgtttgtttacacgtgacataacaccggtggagccatctt

SEQ ID NO: 2179 - DNA, 44 bp, synthetic construct
  misc_feature 1..44: note = oligonucleotide decoy
  source 1..44: mol_type = other DNA
caggtgtttgtttacacgtgacataacagcggtggagccatctt

SEQ ID NO: 2180 - DNA, 44 bp, synthetic construct
  misc_feature 1..44: note = oligonucleotide decoy
  source 1..44: mol_type = other DNA
caggtgtttgtttacacgtgacataacatcggtggagccatctt

SEQ ID NO: 2181 - DNA, 44 bp, synthetic construct
  misc_feature 1..44: note = oligonucleotide decoy
  source 1..44: mol_type = other DNA
caggtgtttgtttacacgtgacgtaacaacggtggagccatctt

SEQ ID NO: 2182 - DNA, 44 bp, synthetic construct
  misc_feature 1..44: note = oligonucleotide decoy
  source 1..44: mol_type = other DNA
caggtgtttgtttacacgtgacgtaacaccggtggagccatctt

SEQ ID NO: 2183 - DNA, 44 bp, synthetic construct
  misc_feature 1..44: note = oligonucleotide decoy
  source 1..44: mol_type = other DNA
caggtgtttgtttacacgtgacgtaacagcggtggagccatctt

SEQ ID NO: 2184 - DNA, 44 bp, synthetic construct
  misc_feature 1..44: note = oligonucleotide decoy
  source 1..44: mol_type = other DNA
caggtgtttgtttacacgtgacgtaacatcggtggagccatctt

SEQ ID NO: 2185 - DNA, 44 bp, synthetic construct
  misc_feature 1..44: note = oligonucleotide decoy
  source 1..44: mol_type = other DNA
caggtgtttgtttacacgtgatataacaacggtggagccatctt

SEQ ID NO: 2186 - DNA, 44 bp, synthetic construct
  misc_feature 1..44: note = oligonucleotide decoy
  source 1..44: mol_type = other DNA
caggtgtttgtttacacgtgatataacaccggtggagccatctt

SEQ ID NO: 2187 - DNA, 44 bp, synthetic construct
  misc_feature 1..44: note = oligonucleotide decoy
  source 1..44: mol_type = other DNA
caggtgtttgtttacacgtgatataacagcggtggagccatctt

SEQ ID NO: 2188 - DNA, 44 bp, synthetic construct
  misc_feature 1..44: note = oligonucleotide decoy
  source 1..44: mol_type = other DNA
caggtgtttgtttacacgtgatataacatcggtggagccatctt

SEQ ID NO: 2189 - DNA, 44 bp, synthetic construct
  misc_feature 1..44: note = oligonucleotide decoy
  source 1..44: mol_type = other DNA
caggtgtttgtttacacgtgatgtaacaacggtggagccatctt

SEQ ID NO: 2190 - DNA, 44 bp, synthetic construct
  misc_feature 1..44: note = oligonucleotide decoy
  source 1..44: mol_type = other DNA
caggtgtttgtttacacgtgatgtaacaccggtggagccatctt

SEQ ID NO: 2191 - DNA, 44 bp, synthetic construct
  misc_feature 1..44: note = oligonucleotide decoy
  source 1..44: mol_type = other DNA
caggtgtttgtttacacgtgatgtaacagcggtggagccatctt

SEQ ID NO: 2192 - DNA, 44 bp, synthetic construct
  misc_feature 1..44: note = oligonucleotide decoy
  source 1..44: mol_type = other DNA
caggtgtttgtttacacgtgatgtaacatcggtggagccatctt

SEQ ID NO: 2193 - DNA, 44 bp, synthetic construct
  misc_feature 1..44: note = oligonucleotide decoy
  source 1..44: mol_type = other DNA
caggtgtttatttacacgtgacataacaacggtggagccatttt

SEQ ID NO: 2194 - DNA, 44 bp, synthetic construct
  misc_feature 1..44: note = oligonucleotide decoy
  source 1..44: mol_type = other DNA
caggtgtttatttacacgtgacataacaccggtggagccatttt

SEQ ID NO: 2195 - DNA, 44 bp, synthetic construct
  misc_feature 1..44: note = oligonucleotide decoy
  source 1..44: mol_type = other DNA
caggtgtttatttacacgtgacataacagcggtggagccatttt

SEQ ID NO: 2196 - DNA, 44 bp, synthetic construct
  misc_feature 1..44: note = oligonucleotide decoy
  source 1..44: mol_type = other DNA
caggtgtttatttacacgtgacataacatcggtggagccatttt

SEQ ID NO: 2197 - DNA, 44 bp, synthetic construct
  misc_feature 1..44: note = oligonucleotide decoy
  source 1..44: mol_type = other DNA
caggtgtttatttacacgtgacgtaacaacggtggagccatttt

SEQ ID NO: 2198 - DNA, 44 bp, synthetic construct
  misc_feature 1..44: note = oligonucleotide decoy
  source 1..44: mol_type = other DNA
caggtgtttatttacacgtgacgtaacaccggtggagccatttt

SEQ ID NO: 2199 - DNA, 44 bp, synthetic construct
  misc_feature 1..44: note = oligonucleotide decoy
  source 1..44: mol_type = other DNA
caggtgtttatttacacgtgacgtaacagcggtggagccatttt

SEQ ID NO: 2200 - DNA, 44 bp, synthetic construct
  misc_feature 1..44: note = oligonucleotide decoy
  source 1..44: mol_type = other DNA
caggtgtttatttacacgtgacgtaacatcggtggagccatttt

SEQ ID NO: 2201 - DNA, 44 bp, synthetic construct
  misc_feature 1..44: note = oligonucleotide decoy
  source 1..44: mol_type = other DNA
caggtgtttatttacacgtgatataacaacggtggagccatttt

SEQ ID NO: 2202 - DNA, 44 bp, synthetic construct
  misc_feature 1..44: note = oligonucleotide decoy
  source 1..44: mol_type = other DNA
caggtgtttatttacacgtgatataacaccggtggagccatttt

SEQ ID NO: 2203 - DNA, 44 bp, synthetic construct
  misc_feature 1..44: note = oligonucleotide decoy
  source 1..44: mol_type = other DNA
caggtgtttatttacacgtgatataacagcggtggagccatttt

SEQ ID NO: 2204 - DNA, 44 bp, synthetic construct
  misc_feature 1..44: note = oligonucleotide decoy
  source 1..44: mol_type = other DNA
caggtgtttatttacacgtgatataacatcggtggagccatttt

SEQ ID NO: 2205 - DNA, 44 bp, synthetic construct
  misc_feature 1..44: note = oligonucleotide decoy
  source 1..44: mol_type = other DNA
caggtgtttatttacacgtgatgtaacaacggtggagccatttt

SEQ ID NO: 2206 - DNA, 44 bp, synthetic construct
  misc_feature 1..44: note = oligonucleotide decoy
  source 1..44: mol_type = other DNA
caggtgtttatttacacgtgatgtaacaccggtggagccatttt

SEQ ID NO: 2207 - DNA, 44 bp, synthetic construct
  misc_feature 1..44: note = oligonucleotide decoy
  source 1..44: mol_type = other DNA
caggtgtttatttacacgtgatgtaacagcggtggagccatttt

SEQ ID NO: 2208 - DNA, 44 bp, synthetic construct
  misc_feature 1..44: note = oligonucleotide decoy
  source 1..44: mol_type = other DNA
caggtgtttatttacacgtgatgtaacatcggtggagccatttt

SEQ ID NO: 2209 - DNA, 44 bp, synthetic construct
  misc_feature 1..44: note = oligonucleotide decoy
  source 1..44: mol_type = other DNA
caggtgtttgtttacacgtgacataacaacggtggagccatttt

SEQ ID NO: 2210 - DNA, 44 bp, synthetic construct
  misc_feature 1..44: note = oligonucleotide decoy
  source 1..44: mol_type = other DNA
caggtgtttgtttacacgtgacataacaccggtggagccatttt

SEQ ID NO: 2211 - DNA, 44 bp, synthetic construct
  misc_feature 1..44: note = oligonucleotide decoy
  source 1..44: mol_type = other DNA
caggtgtttgtttacacgtgacataacagcggtggagccatttt

SEQ ID NO: 2212 - DNA, 44 bp, synthetic construct
  misc_feature 1..44: note = oligonucleotide decoy
  source 1..44: mol_type = other DNA
caggtgtttgtttacacgtgacataacatcggtggagccatttt

SEQ ID NO: 2213 - DNA, 44 bp, synthetic construct
  misc_feature 1..44: note = oligonucleotide decoy
  source 1..44: mol_type = other DNA
caggtgtttgtttacacgtgacgtaacaacggtggagccatttt

SEQ ID NO: 2214 - DNA, 44 bp, synthetic construct
  misc_feature 1..44: note = oligonucleotide decoy
  source 1..44: mol_type = other DNA
caggtgtttgtttacacgtgacgtaacaccggtggagccatttt

SEQ ID NO: 2215 - DNA, 44 bp, synthetic construct
  misc_feature 1..44: note = oligonucleotide decoy
  source 1..44: mol_type = other DNA
caggtgtttgtttacacgtgacgtaacagcggtggagccatttt

SEQ ID NO: 2216 - DNA, 44 bp, synthetic construct
  misc_feature 1..44: note = oligonucleotide decoy
  source 1..44: mol_type = other DNA
caggtgtttgtttacacgtgacgtaacatcggtggagccatttt

SEQ ID NO: 2217 - DNA, 44 bp, synthetic construct
  misc_feature 1..44: note = oligonucleotide decoy
  source 1..44: mol_type = other DNA
caggtgtttgtttacacgtgatataacaacggtggagccatttt

SEQ ID NO: 2218 - DNA, 44 bp, synthetic construct
  misc_feature 1..44: note = oligonucleotide decoy
  source 1..44: mol_type = other DNA
caggtgtttgtttacacgtgatataacaccggtggagccatttt

SEQ ID NO: 2219 - DNA, 44 bp, synthetic construct
  misc_feature 1..44: note = oligonucleotide decoy
  source 1..44: mol_type = other DNA
caggtgtttgtttacacgtgatataacagcggtggagccatttt

SEQ ID NO: 2220 - DNA, 44 bp, synthetic construct
  misc_feature 1..44: note = oligonucleotide decoy
  source 1..44: mol_type = other DNA
caggtgtttgtttacacgtgatataacatcggtggagccatttt

SEQ ID NO: 2221 - DNA, 44 bp, synthetic construct
  misc_feature 1..44: note = oligonucleotide decoy
  source 1..44: mol_type = other DNA
caggtgtttgtttacacgtgatgtaacaacggtggagccatttt

SEQ ID NO: 2222 - DNA, 44 bp, synthetic construct
  misc_feature 1..44: note = oligonucleotide decoy
  source 1..44: mol_type = other DNA
caggtgtttgtttacacgtgatgtaacaccggtggagccatttt

SEQ ID NO: 2223 - DNA, 44 bp, synthetic construct
  misc_feature 1..44: note = oligonucleotide decoy
  source 1..44: mol_type = other DNA
caggtgtttgtttacacgtgatgtaacagcggtggagccatttt

SEQ ID NO: 2224 - DNA, 44 bp, synthetic construct
  misc_feature 1..44: note = oligonucleotide decoy
  source 1..44: mol_type = other DNA
caggtgtttgtttacacgtgatgtaacatcggtggagccatttt

SEQ ID NO: 2225 - DNA, 44 bp, synthetic construct
  misc_feature 1..44: note = oligonucleotide decoy
  source 1..44: mol_type = other DNA
cacctgtttatttacacgtgttacatcaccgatggagccatctt

SEQ ID NO: 2226 - DNA, 44 bp, synthetic construct
  misc_feature 1..44: note = oligonucleotide decoy
  source 1..44: mol_type = other DNA
cacctgtttatttacacgtgttacatcatcgatggagccatctt

SEQ ID NO: 2227 - DNA, 44 bp, synthetic construct
  misc_feature 1..44: note = oligonucleotide decoy
  source 1..44: mol_type = other DNA
cacctgtttatttacacgtgttacgtcaccgatggagccatctt

SEQ ID NO: 2228 - DNA, 44 bp, synthetic construct
  misc_feature 1..44: note = oligonucleotide decoy
  source 1..44: mol_type = other DNA
cacctgtttatttacacgtgttacgtcatcgatggagccatctt

SEQ ID NO: 2229 - DNA, 44 bp, synthetic construct
  misc_feature 1..44: note = oligonucleotide decoy
  source 1..44: mol_type = other DNA
cacctgtttatttacacgtgttatatcaccgatggagccatctt

SEQ ID NO: 2230 - DNA, 44 bp, synthetic construct
  misc_feature 1..44: note = oligonucleotide decoy
  source 1..44: mol_type = other DNA
cacctgtttatttacacgtgttatatcatcgatggagccatctt

SEQ ID NO: 2231 - DNA, 44 bp, synthetic construct
  misc_feature 1..44: note = oligonucleotide decoy
  source 1..44: mol_type = other DNA
cacctgtttatttacacgtgttatgtcaccgatggagccatctt

SEQ ID NO: 2232 - DNA, 44 bp, synthetic construct
  misc_feature 1..44: note = oligonucleotide decoy
  source 1..44: mol_type = other DNA
cacctgtttatttacacgtgttatgtcatcgatggagccatctt

SEQ ID NO: 2233 - DNA, 44 bp, synthetic construct
  misc_feature 1..44: note = oligonucleotide decoy
  source 1..44: mol_type = other DNA
cacctgtttgtttacacgtgttacatcaccgatggagccatctt

SEQ ID NO: 2234 - DNA, 44 bp, synthetic construct
  misc_feature 1..44: note = oligonucleotide decoy
  source 1..44: mol_type = other DNA
cacctgtttgtttacacgtgttacatcatcgatggagccatctt

SEQ ID NO: 2235 - DNA, 44 bp, synthetic construct
  misc_feature 1..44: note = oligonucleotide decoy
  source 1..44: mol_type = other DNA
cacctgtttgtttacacgtgttacgtcaccgatggagccatctt

SEQ ID NO: 2236 - DNA, 44 bp, synthetic construct
  misc_feature 1..44: note = oligonucleotide decoy
  source 1..44: mol_type = other DNA
cacctgtttgtttacacgtgttacgtcatcgatggagccatctt

SEQ ID NO: 2237 - DNA, 44 bp, synthetic construct
  misc_feature 1..44: note = oligonucleotide decoy
  source 1..44: mol_type = other DNA
cacctgtttgtttacacgtgttatatcaccgatggagccatctt

SEQ ID NO: 2238 - DNA, 44 bp, synthetic construct
  misc_feature 1..44: note = oligonucleotide decoy
  source 1..44: mol_type = other DNA
cacctgtttgtttacacgtgttatatcatcgatggagccatctt

SEQ ID NO: 2239 - DNA, 44 bp, synthetic construct
  misc_feature 1..44: note = oligonucleotide decoy
  source 1..44: mol_type = other DNA
cacctgtttgtttacacgtgttatgtcaccgatggagccatctt

SEQ ID NO: 2240 - DNA, 44 bp, synthetic construct
  misc_feature 1..44: note = oligonucleotide decoy
  source 1..44: mol_type = other DNA
cacctgtttgtttacacgtgttatgtcatcgatggagccatctt

SEQ ID NO: 2241 - DNA, 44 bp, synthetic construct
  misc_feature 1..44: note = oligonucleotide decoy
  source 1..44: mol_type = other DNA
cacctgtttatttacacgtgttacatcaccgatggagccatttt

SEQ ID NO: 2242 - DNA, 44 bp, synthetic construct
  misc_feature 1..44: note = oligonucleotide decoy
  source 1..44: mol_type = other DNA
cacctgtttatttacacgtgttacatcatcgatggagccatttt

SEQ ID NO: 2243 - DNA, 44 bp, synthetic construct
  misc_feature 1..44: note = oligonucleotide decoy
  source 1..44: mol_type = other DNA
cacctgtttatttacacgtgttacgtcaccgatggagccatttt

SEQ ID NO: 2244 - DNA, 44 bp, synthetic construct
  misc_feature 1..44: note = oligonucleotide decoy
  source 1..44: mol_type = other DNA
cacctgtttatttacacgtgttacgtcatcgatggagccatttt

SEQ ID NO: 2245 - DNA, 44 bp, synthetic construct
  misc_feature 1..44: note = oligonucleotide decoy
  source 1..44: mol_type = other DNA
cacctgtttatttacacgtgttatatcaccgatggagccatttt

SEQ ID NO: 2246 - DNA, 44 bp, synthetic construct
  misc_feature 1..44: note = oligonucleotide decoy
  source 1..44: mol_type = other DNA
cacctgtttatttacacgtgttatatcatcgatggagccatttt

SEQ ID NO: 2247 - DNA, 44 bp, synthetic construct
  misc_feature 1..44: note = oligonucleotide decoy
  source 1..44: mol_type = other DNA
cacctgtttatttacacgtgttatgtcaccgatggagccatttt

SEQ ID NO: 2248 - DNA, 44 bp, synthetic construct
  misc_feature 1..44: note = oligonucleotide decoy
  source 1..44: mol_type = other DNA
cacctgtttatttacacgtgttatgtcatcgatggagccatttt

SEQ ID NO: 2249 - DNA, 44 bp, synthetic construct
  misc_feature 1..44: note = oligonucleotide decoy
  source 1..44: mol_type = other DNA
cacctgtttgtttacacgtgttacatcaccgatggagccatttt

SEQ ID NO: 2250 - DNA, 44 bp, synthetic construct
  misc_feature 1..44: note = oligonucleotide decoy
  source 1..44: mol_type = other DNA
cacctgtttgtttacacgtgttacatcatcgatggagccatttt

SEQ ID NO: 2251 - DNA, 44 bp, synthetic construct
  misc_feature 1..44: note = oligonucleotide decoy
  source 1..44: mol_type = other DNA
cacctgtttgtttacacgtgttacgtcaccgatggagccatttt

SEQ ID NO: 2252 - DNA, 44 bp, synthetic construct
  misc_feature 1..44: note = oligonucleotide decoy
  source 1..44: mol_type = other DNA
cacctgtttgtttacacgtgttacgtcatcgatggagccatttt

SEQ ID NO: 2253 - DNA, 44 bp, synthetic construct
  misc_feature 1..44: note = oligonucleotide decoy
  source 1..44: mol_type = other DNA
cacctgtttgtttacacgtgttatatcaccgatggagccatttt

SEQ ID NO: 2254 - DNA, 44 bp, synthetic construct
  misc_feature 1..44: note = oligonucleotide decoy
  source 1..44: mol_type = other DNA
cacctgtttgtttacacgtgttatatcatcgatggagccatttt

SEQ ID NO: 2255 - DNA, 44 bp, synthetic construct
  misc_feature 1..44: note = oligonucleotide decoy
  source 1..44: mol_type = other DNA
cacctgtttgtttacacgtgttatgtcaccgatggagccatttt

SEQ ID NO: 2256 - DNA, 44 bp, synthetic construct
  misc_feature 1..44: note = oligonucleotide decoy
  source 1..44: mol_type = other DNA
cacctgtttgtttacacgtgttatgtcatcgatggagccatttt

SEQ ID NO: 2257 - DNA, 44 bp, synthetic construct
  misc_feature 1..44: note = oligonucleotide decoy
  source 1..44: mol_type = other DNA
cacctgtttatttacacgtgttacatcaccggtggagccatctt

SEQ ID NO: 2258 - DNA, 44 bp, synthetic construct
  misc_feature 1..44: note = oligonucleotide decoy
  source 1..44: mol_type = other DNA
cacctgtttatttacacgtgttacatcatcggtggagccatctt

SEQ ID NO: 2259 - DNA, 44 bp, synthetic construct
  misc_feature 1..44: note = oligonucleotide decoy
  source 1..44: mol_type = other DNA
cacctgtttatttacacgtgttacgtcaccggtggagccatctt

SEQ ID NO: 2260 - DNA, 44 bp, synthetic construct
  misc_feature 1..44: note = oligonucleotide decoy
  source 1..44: mol_type = other DNA
cacctgtttatttacacgtgttacgtcatcggtggagccatctt

SEQ ID NO: 2261 - DNA, 44 bp, synthetic construct
  misc_feature 1..44: note = oligonucleotide decoy
  source 1..44: mol_type = other DNA
cacctgtttatttacacgtgttatatcaccggtggagccatctt

SEQ ID NO: 2262 - DNA, 44 bp, synthetic construct
  misc_feature 1..44: note = oligonucleotide decoy
  source 1..44: mol_type = other DNA
cacctgtttatttacacgtgttatatcatcggtggagccatctt

SEQ ID NO: 2263 - DNA, 44 bp, synthetic construct
  misc_feature 1..44: note = oligonucleotide decoy
  source 1..44: mol_type = other DNA
cacctgtttatttacacgtgttatgtcaccggtggagccatctt

SEQ ID NO: 2264 - DNA, 44 bp, synthetic construct
  misc_feature 1..44: note = oligonucleotide decoy
  source 1..44: mol_type = other DNA
cacctgtttatttacacgtgttatgtcatcggtggagccatctt

SEQ ID NO: 2265 - DNA, 44 bp, synthetic construct
  misc_feature 1..44: note = oligonucleotide decoy
  source 1..44: mol_type = other DNA
cacctgtttgtttacacgtgttacatcaccggtggagccatctt

SEQ ID NO: 2266 - DNA, 44 bp, synthetic construct
  misc_feature 1..44: note = oligonucleotide decoy
  source 1..44: mol_type = other DNA
cacctgtttgtttacacgtgttacatcatcggtggagccatctt

SEQ ID NO: 2267 - DNA, 44 bp, synthetic construct
  misc_feature 1..44: note = oligonucleotide decoy
  source 1..44: mol_type = other DNA
cacctgtttgtttacacgtgttacgtcaccggtggagccatctt

SEQ ID NO: 2268 - DNA, 44 bp, synthetic construct
  misc_feature 1..44: note = oligonucleotide decoy
  source 1..44: mol_type = other DNA
cacctgtttgtttacacgtgttacgtcatcggtggagccatctt

SEQ ID NO: 2269 - DNA, 44 bp, synthetic construct
  misc_feature 1..44: note = oligonucleotide decoy
  source 1..44: mol_type = other DNA
cacctgtttgtttacacgtgttatatcaccggtggagccatctt

SEQ ID NO: 2270 - DNA, 44 bp, synthetic construct
  misc_feature 1..44: note = oligonucleotide decoy
  source 1..44: mol_type = other DNA
cacctgtttgtttacacgtgttatatcatcggtggagccatctt

SEQ ID NO: 2271 - DNA, 44 bp, synthetic construct
  misc_feature 1..44: note = oligonucleotide decoy
  source 1..44: mol_type = other DNA
cacctgtttgtttacacgtgttatgtcaccggtggagccatctt

SEQ ID NO: 2272 - DNA, 44 bp, synthetic construct
  misc_feature 1..44: note = oligonucleotide decoy
  source 1..44: mol_type = other DNA
cacctgtttgtttacacgtgttatgtcatcggtggagccatctt

SEQ ID NO: 2273 - DNA, 44 bp, synthetic construct
  misc_feature 1..44: note = oligonucleotide decoy
  source 1..44: mol_type = other DNA
cacctgtttatttacacgtgttacatcaccggtggagccatttt

SEQ ID NO: 2274 - DNA, 44 bp, synthetic construct
  misc_feature 1..44: note = oligonucleotide decoy
  source 1..44: mol_type = other DNA
cacctgtttatttacacgtgttacatcatcggtggagccatttt

SEQ ID NO: 2275 - DNA, 44 bp, synthetic construct
  misc_feature 1..44: note = oligonucleotide decoy
  source 1..44: mol_type = other DNA
cacctgtttatttacacgtgttacgtcaccggtggagccatttt

SEQ ID NO: 2276 - DNA, 44 bp, synthetic construct
  misc_feature 1..44: note = oligonucleotide decoy
  source 1..44: mol_type = other DNA
cacctgtttatttacacgtgttacgtcatcggtggagccatttt

SEQ ID NO: 2277 - DNA, 44 bp, synthetic construct
  misc_feature 1..44: note = oligonucleotide decoy
  source 1..44: mol_type = other DNA
cacctgtttatttacacgtgttatatcaccggtggagccatttt

SEQ ID NO: 2278 - DNA, 44 bp, synthetic construct
  misc_feature 1..44: note = oligonucleotide decoy
  source 1..44: mol_type = other DNA
cacctgtttatttacacgtgttatatcatcggtggagccatttt

SEQ ID NO: 2279 - DNA, 44 bp, synthetic construct
  misc_feature 1..44: note = oligonucleotide decoy
  source 1..44: mol_type = other DNA
cacctgtttatttacacgtgttatgtcaccggtggagccatttt

SEQ ID NO: 2280 - DNA, 44 bp, synthetic construct
  misc_feature 1..44: note = oligonucleotide decoy
  source 1..44: mol_type = other DNA
cacctgtttatttacacgtgttatgtcatcggtggagccatttt

SEQ ID NO: 2281 - DNA, 44 bp, synthetic construct
  misc_feature 1..44: note = oligonucleotide decoy
  source 1..44: mol_type = other DNA
cacctgtttgtttacacgtgttacatcaccggtggagccatttt

SEQ ID NO: 2282 - DNA, 44 bp, synthetic construct
  misc_feature 1..44: note = oligonucleotide decoy
  source 1..44: mol_type = other DNA
cacctgtttgtttacacgtgttacatcatcggtggagccatttt

SEQ ID NO: 2283 - DNA, 44 bp, synthetic construct
  misc_feature 1..44: note = oligonucleotide decoy
  source 1..44: mol_type = other DNA
cacctgtttgtttacacgtgttacgtcaccggtggagccatttt

SEQ ID NO: 2284 - DNA, 44 bp, synthetic construct
  misc_feature 1..44: note = oligonucleotide decoy
  source 1..44: mol_type = other DNA
cacctgtttgtttacacgtgttacgtcatcggtggagccatttt

SEQ ID NO: 2285 - DNA, 44 bp, synthetic construct
  misc_feature 1..44: note = oligonucleotide decoy
  source 1..44: mol_type = other DNA
cacctgtttgtttacacgtgttatatcaccggtggagccatttt

SEQ ID NO: 2286 - DNA, 44 bp, synthetic construct
  misc_feature 1..44: note = oligonucleotide decoy
  source 1..44: mol_type = other DNA
cacctgtttgtttacacgtgttatatcatcggtggagccatttt

SEQ ID NO: 2287 - DNA, 44 bp, synthetic construct
  misc_feature 1..44: note = oligonucleotide decoy
  source 1..44: mol_type = other DNA
cacctgtttgtttacacgtgttatgtcaccggtggagccatttt

SEQ ID NO: 2288 - DNA, 44 bp, synthetic construct
  misc_feature 1..44: note = oligonucleotide decoy
  source 1..44: mol_type = other DNA
cacctgtttgtttacacgtgttatgtcatcggtggagccatttt

SEQ ID NO: 2289 - DNA, 44 bp, synthetic construct
  misc_feature 1..44: note = oligonucleotide decoy
  source 1..44: mol_type = other DNA
caggtgtttatttacacgtgttacatcaccgatggagccatctt

SEQ ID NO: 2290 - DNA, 44 bp, synthetic construct
  misc_feature 1..44: note = oligonucleotide decoy
  source 1..44: mol_type = other DNA
caggtgtttatttacacgtgttacatcatcgatggagccatctt

SEQ ID NO: 2291 - DNA, 44 bp, synthetic construct
  misc_feature 1..44: note = oligonucleotide decoy
  source 1..44: mol_type = other DNA
caggtgtttatttacacgtgttacgtcaccgatggagccatctt

SEQ ID NO: 2292 - DNA, 44 bp, synthetic construct
  misc_feature 1..44: note = oligonucleotide decoy
  source 1..44: mol_type = other DNA
caggtgtttatttacacgtgttacgtcatcgatggagccatctt

SEQ ID NO: 2293 - DNA, 44 bp, synthetic construct
  misc_feature 1..44: note = oligonucleotide decoy
  source 1..44: mol_type = other DNA
caggtgtttatttacacgtgttatatcaccgatggagccatctt

SEQ ID NO: 2294 - DNA, 44 bp, synthetic construct
  misc_feature 1..44: note = oligonucleotide decoy
  source 1..44: mol_type = other DNA
caggtgtttatttacacgtgttatatcatcgatggagccatctt

SEQ ID NO: 2295 - DNA, 44 bp, synthetic construct
  misc_feature 1..44: note = oligonucleotide decoy
  source 1..44: mol_type = other DNA
caggtgtttatttacacgtgttatgtcaccgatggagccatctt

SEQ ID NO: 2296 - DNA, 44 bp, synthetic construct
  misc_feature 1..44: note = oligonucleotide decoy
  source 1..44: mol_type = other DNA
caggtgtttatttacacgtgttatgtcatcgatggagccatctt

SEQ ID NO: 2297 - DNA, 44 bp, synthetic construct
  misc_feature 1..44: note = oligonucleotide decoy
  source 1..44: mol_type = other DNA
caggtgtttgtttacacgtgttacatcaccgatggagccatctt

SEQ ID NO: 2298 - DNA, 44 bp, synthetic construct
  misc_feature 1..44: note = oligonucleotide decoy
  source 1..44: mol_type = other DNA
caggtgtttgtttacacgtgttacatcatcgatggagccatctt

SEQ ID NO: 2299 - DNA, 44 bp, synthetic construct
  misc_feature 1..44: note = oligonucleotide decoy
  source 1..44: mol_type = other DNA
caggtgtttgtttacacgtgttacgtcaccgatggagccatctt

SEQ ID NO: 2300 - DNA, 44 bp, synthetic construct
  misc_feature 1..44: note = oligonucleotide decoy
  source 1..44: mol_type = other DNA
caggtgtttgtttacacgtgttacgtcatcgatggagccatctt

SEQ ID NO: 2301 - DNA, 44 bp, synthetic construct
  misc_feature 1..44: note = oligonucleotide decoy
  source 1..44: mol_type = other DNA
caggtgtttgtttacacgtgttatatcaccgatggagccatctt

SEQ ID NO: 2302 - DNA, 44 bp, synthetic construct
  misc_feature 1..44: note = oligonucleotide decoy
  source 1..44: mol_type = other DNA
caggtgtttgtttacacgtgttatatcatcgatggagccatctt

SEQ ID NO: 2303 - DNA, 44 bp, synthetic construct
  misc_feature 1..44: note = oligonucleotide decoy
  source 1..44: mol_type = other DNA
caggtgtttgtttacacgtgttatgtcaccgatggagccatctt

SEQ ID NO: 2304 - DNA, 44 bp, synthetic construct
  misc_feature 1..44: note = oligonucleotide decoy
  source 1..44: mol_type = other DNA
caggtgtttgtttacacgtgttatgtcatcgatggagccatctt

SEQ ID NO: 2305 - DNA, 44 bp, synthetic construct
  misc_feature 1..44: note = oligonucleotide decoy
  source 1..44: mol_type = other DNA
caggtgtttatttacacgtgttacatcaccgatggagccatttt

SEQ ID NO: 2306 - DNA, 44 bp, synthetic construct
  misc_feature 1..44: note = oligonucleotide decoy
  source 1..44: mol_type = other DNA
caggtgtttatttacacgtgttacatcatcgatggagccatttt

SEQ ID NO: 2307 - DNA, 44 bp, synthetic construct
  misc_feature 1..44: note = oligonucleotide decoy
  source 1..44: mol_type = other DNA
caggtgtttatttacacgtgttacgtcaccgatggagccatttt

SEQ ID NO: 2308 - DNA, 44 bp, synthetic construct
  misc_feature 1..44: note = oligonucleotide decoy
  source 1..44: mol_type = other DNA
caggtgtttatttacacgtgttacgtcatcgatggagccatttt

SEQ ID NO: 2309 - DNA, 44 bp, synthetic construct
  misc_feature 1..44: note = oligonucleotide decoy
  source 1..44: mol_type = other DNA
caggtgtttatttacacgtgttatatcaccgatggagccatttt

SEQ ID NO: 2310 - DNA, 44 bp, synthetic construct
  misc_feature 1..44: note = oligonucleotide decoy
  source 1..44: mol_type = other DNA
caggtgtttatttacacgtgttatatcatcgatggagccatttt

SEQ ID NO: 2311 - DNA, 44 bp, synthetic construct
  misc_feature 1..44: note = oligonucleotide decoy
  source 1..44: mol_type = other DNA
caggtgtttatttacacgtgttatgtcaccgatggagccatttt

SEQ ID NO: 2312 - DNA, 44 bp, synthetic construct
  misc_feature 1..44: note = oligonucleotide decoy
  source 1..44: mol_type = other DNA
caggtgtttatttacacgtgttatgtcatcgatggagccatttt

SEQ ID NO: 2313 - DNA, 44 bp, synthetic construct
  misc_feature 1..44: note = oligonucleotide decoy
  source 1..44: mol_type = other DNA
caggtgtttgtttacacgtgttacatcaccgatggagccatttt

SEQ ID NO: 2314 - DNA, 44 bp, synthetic construct
  misc_feature 1..44: note = oligonucleotide decoy
  source 1..44: mol_type = other DNA
caggtgtttgtttacacgtgttacatcatcgatggagccatttt

SEQ ID NO: 2315 - DNA, 44 bp, synthetic construct
  misc_feature 1..44: note = oligonucleotide decoy
  source 1..44: mol_type = other DNA
caggtgtttgtttacacgtgttacgtcaccgatggagccatttt

SEQ ID NO: 2316 - DNA, 44 bp, synthetic construct
  misc_feature 1..44: note = oligonucleotide decoy
  source 1..44: mol_type = other DNA
caggtgtttgtttacacgtgttacgtcatcgatggagccatttt

SEQ ID NO: 2317 - DNA, 44 bp, synthetic construct
  misc_feature 1..44: note = oligonucleotide decoy
  source 1..44: mol_type = other DNA
caggtgtttgtttacacgtgttatatcaccgatggagccatttt

SEQ ID NO: 2318 - DNA, 44 bp, synthetic construct
  misc_feature 1..44: note = oligonucleotide decoy
  source 1..44: mol_type = other DNA
caggtgtttgtttacacgtgttatatcatcgatggagccatttt

SEQ ID NO: 2319 - DNA, 44 bp, synthetic construct
  misc_feature 1..44: note = oligonucleotide decoy
  source 1..44: mol_type = other DNA
caggtgtttgtttacacgtgttatgtcaccgatggagccatttt

SEQ ID NO: 2320 - DNA, 44 bp, synthetic construct
  misc_feature 1..44: note = oligonucleotide decoy
  source 1..44: mol_type = other DNA
caggtgtttgtttacacgtgttatgtcatcgatggagccatttt

SEQ ID NO: 2321 - DNA, 44 bp, synthetic construct
  misc_feature 1..44: note = oligonucleotide decoy
  source 1..44: mol_type = other DNA
caggtgtttatttacacgtgttacatcaccggtggagccatctt

SEQ ID NO: 2322 - DNA, 44 bp, synthetic construct
  misc_feature 1..44: note = oligonucleotide decoy
  source 1..44: mol_type = other DNA
caggtgtttatttacacgtgttacatcatcggtggagccatctt

SEQ ID NO: 2323 - DNA, 44 bp, synthetic construct
  misc_feature 1..44: note = oligonucleotide decoy
  source 1..44: mol_type = other DNA
caggtgtttatttacacgtgttacgtcaccggtggagccatctt

SEQ ID NO: 2324 - DNA, 44 bp, synthetic construct
  misc_feature 1..44: note = oligonucleotide decoy
  source 1..44: mol_type = other DNA
caggtgtttatttacacgtgttacgtcatcggtggagccatctt

SEQ ID NO: 2325 - DNA, 44 bp, synthetic construct
  misc_feature 1..44: note = oligonucleotide decoy
  source 1..44: mol_type = other DNA
caggtgtttatttacacgtgttatatcaccggtggagccatctt

SEQ ID NO: 2326 - DNA, 44 bp, synthetic construct
  misc_feature 1..44: note = oligonucleotide decoy
  source 1..44: mol_type = other DNA
caggtgtttatttacacgtgttatatcatcggtggagccatctt

SEQ ID NO: 2327 - DNA, 44 bp, synthetic construct
  misc_feature 1..44: note = oligonucleotide decoy
  source 1..44: mol_type = other DNA
caggtgtttatttacacgtgttatgtcaccggtggagccatctt

SEQ ID NO: 2328 - DNA, 44 bp, synthetic construct
  misc_feature 1..44: note = oligonucleotide decoy
  source 1..44: mol_type = other DNA
caggtgtttatttacacgtgttatgtcatcggtggagccatctt

SEQ ID NO: 2329 - DNA, 44 bp, synthetic construct
  misc_feature 1..44: note = oligonucleotide decoy
  source 1..44: mol_type = other DNA
caggtgtttgtttacacgtgttacatcaccggtggagccatctt

SEQ ID NO: 2330 - DNA, 44 bp, synthetic construct
  misc_feature 1..44: note = oligonucleotide decoy
  source 1..44: mol_type = other DNA
caggtgtttgtttacacgtgttacatcatcggtggagccatctt

SEQ ID NO: 2331 - DNA, 44 bp, synthetic construct
  misc_feature 1..44: note = oligonucleotide decoy
  source 1..44: mol_type = other DNA
caggtgtttgtttacacgtgttacgtcaccggtggagccatctt

SEQ ID NO: 2332 - DNA, 44 bp, synthetic construct
  misc_feature 1..44: note = oligonucleotide decoy
  source 1..44: mol_type = other DNA
caggtgtttgtttacacgtgttacgtcatcggtggagccatctt

SEQ ID NO: 2333 - DNA, 44 bp, synthetic construct
  misc_feature 1..44: note = oligonucleotide decoy
  source 1..44: mol_type = other DNA
caggtgtttgtttacacgtgttatatcaccggtggagccatctt

SEQ ID NO: 2334 - DNA, 44 bp, synthetic construct
  misc_feature 1..44: note = oligonucleotide decoy
  source 1..44: mol_type = other DNA
caggtgtttgtttacacgtgttatatcatcggtggagccatctt

SEQ ID NO: 2335 - DNA, 44 bp, synthetic construct
  misc_feature 1..44: note = oligonucleotide decoy
  source 1..44: mol_type = other DNA
caggtgtttgtttacacgtgttatgtcaccggtggagccatctt

SEQ ID NO: 2336 - DNA, 44 bp, synthetic construct
  misc_feature 1..44: note = oligonucleotide decoy
  source 1..44: mol_type = other DNA
caggtgtttgtttacacgtgttatgtcatcggtggagccatctt

SEQ ID NO: 2337 - DNA, 44 bp, synthetic construct
  misc_feature 1..44: note = oligonucleotide decoy
  source 1..44: mol_type = other DNA
caggtgtttatttacacgtgttacatcaccggtggagccatttt

SEQ ID NO: 2338 - DNA, 44 bp, synthetic construct
  misc_feature 1..44: note = oligonucleotide decoy
  source 1..44: mol_type = other DNA
caggtgtttatttacacgtgttacatcatcggtggagccatttt

SEQ ID NO: 2339 - DNA, 44 bp, synthetic construct
  misc_feature 1..44: note = oligonucleotide decoy
  source 1..44: mol_type = other DNA
caggtgtttatttacacgtgttacgtcaccggtggagccatttt

SEQ ID NO: 2340 - DNA, 44 bp, synthetic construct
  misc_feature 1..44: note = oligonucleotide decoy
  source 1..44: mol_type = other DNA
caggtgtttatttacacgtgttacgtcatcggtggagccatttt

SEQ ID NO: 2341 - DNA, 44 bp, synthetic construct
  misc_feature 1..44: note = oligonucleotide decoy
  source 1..44: mol_type = other DNA
caggtgtttatttacacgtgttatatcaccggtggagccatttt

SEQ ID NO: 2342 - DNA, 44 bp, synthetic construct
  misc_feature 1..44: note = oligonucleotide decoy
  source 1..44: mol_type = other DNA
caggtgtttatttacacgtgttatatcatcggtggagccatttt

SEQ ID NO: 2343 - DNA, 44 bp, synthetic construct
  misc_feature 1..44: note = oligonucleotide decoy
  source 1..44: mol_type = other DNA
caggtgtttatttacacgtgttatgtcaccggtggagccatttt

SEQ ID NO: 2344 - DNA, 44 bp, synthetic construct
  misc_feature 1..44: note = oligonucleotide decoy
  source 1..44: mol_type = other DNA
caggtgtttatttacacgtgttatgtcatcggtggagccatttt

SEQ ID NO: 2345 - DNA, 44 bp, synthetic construct
  misc_feature 1..44: note = oligonucleotide decoy
  source 1..44: mol_type = other DNA
caggtgtttgtttacacgtgttacatcaccggtggagccatttt

SEQ ID NO: 2346 - DNA, 44 bp, synthetic construct
  misc_feature 1..44: note = oligonucleotide decoy
  source 1..44: mol_type = other DNA
caggtgtttgtttacacgtgttacatcatcggtggagccatttt

SEQ ID NO: 2347 - DNA, 44 bp, synthetic construct
  misc_feature 1..44: note = oligonucleotide decoy
  source 1..44: mol_type = other DNA
caggtgtttgtttacacgtgttacgtcaccggtggagccatttt

SEQ ID NO: 2348 - DNA, 44 bp, synthetic construct
  misc_feature 1..44: note = oligonucleotide decoy
  source 1..44: mol_type = other DNA
caggtgtttgtttacacgtgttacgtcatcggtggagccatttt

SEQ ID NO: 2349 - DNA, 44 bp, synthetic construct
  misc_feature 1..44: note = oligonucleotide decoy
  source 1..44: mol_type = other DNA
caggtgtttgtttacacgtgttatatcaccggtggagccatttt

SEQ ID NO: 2350 - DNA, 44 bp, synthetic construct
  misc_feature 1..44: note = oligonucleotide decoy
  source 1..44: mol_type = other DNA
caggtgtttgtttacacgtgttatatcatcggtggagccatttt

SEQ ID NO: 2351 - DNA, 44 bp, synthetic construct
  misc_feature 1..44: note = oligonucleotide decoy
  source 1..44: mol_type = other DNA
caggtgtttgtttacacgtgttatgtcaccggtggagccatttt

SEQ ID NO: 2352 - DNA, 44 bp, synthetic construct
  misc_feature 1..44: note = oligonucleotide decoy
  source 1..44: mol_type = other DNA
caggtgtttgtttacacgtgttatgtcatcggtggagccatttt

SEQ ID NO: 2353 - DNA, 44 bp, synthetic construct
  misc_feature 1..44: note = oligonucleotide decoy
  source 1..44: mol_type = other DNA
caggtgacataacacgtgtaaacaaacaacgatggagccatctt

SEQ ID NO: 2354 - DNA, 44 bp, synthetic construct
  misc_feature 1..44: note = oligonucleotide decoy
  source 1..44: mol_type = other DNA
caggtgacataacacgtgtaaacaaacaccgatggagccatctt

SEQ ID NO: 2355 - DNA, 44 bp, synthetic construct
  misc_feature 1..44: note = oligonucleotide decoy
  source 1..44: mol_type = other DNA
caggtgacataacacgtgtaaacaaacagcgatggagccatctt

SEQ ID NO: 2356 - DNA, 44 bp, synthetic construct
  misc_feature 1..44: note = oligonucleotide decoy
  source 1..44: mol_type = other DNA
caggtgacataacacgtgtaaacaaacatcgatggagccatctt

SEQ ID NO: 2357 - DNA, 44 bp, synthetic construct
  misc_feature 1..44: note = oligonucleotide decoy
  source 1..44: mol_type = other DNA
caggtgacataacacgtgtaaataaacaacgatggagccatctt

SEQ ID NO: 2358 - DNA, 44 bp, synthetic construct
  misc_feature 1..44: note = oligonucleotide decoy
  source 1..44: mol_type = other DNA
caggtgacataacacgtgtaaataaacaccgatggagccatctt

SEQ ID NO: 2359 - DNA, 44 bp, synthetic construct
  misc_feature 1..44: note = oligonucleotide decoy
  source 1..44: mol_type = other DNA
caggtgacataacacgtgtaaataaacagcgatggagccatctt

SEQ ID NO: 2360 - DNA, 44 bp, synthetic construct
  misc_feature 1..44: note = oligonucleotide decoy
  source 1..44: mol_type = other DNA
caggtgacataacacgtgtaaataaacatcgatggagccatctt

SEQ ID NO: 2361 - DNA, 44 bp, synthetic construct
  misc_feature 1..44: note = oligonucleotide decoy
  source 1..44: mol_type = other DNA
caggtgacgtaacacgtgtaaacaaacaacgatggagccatctt

SEQ ID NO: 2362 - DNA, 44 bp, synthetic construct
  misc_feature 1..44: note = oligonucleotide decoy
  source 1..44: mol_type = other DNA
caggtgacgtaacacgtgtaaacaaacaccgatggagccatctt

SEQ ID NO: 2363 - DNA, 44 bp, synthetic construct
  misc_feature 1..44: note = oligonucleotide decoy
  source 1..44: mol_type = other DNA
caggtgacgtaacacgtgtaaacaaacagcgatggagccatctt

SEQ ID NO: 2364 - DNA, 44 bp, synthetic construct
  misc_feature 1..44: note = oligonucleotide decoy
  source 1..44: mol_type = other DNA
caggtgacgtaacacgtgtaaacaaacatcgatggagccatctt

SEQ ID NO: 2365 - DNA, 44 bp, synthetic construct
  misc_feature 1..44: note = oligonucleotide decoy
  source 1..44: mol_type = other DNA
caggtgacgtaacacgtgtaaataaacaacgatggagccatctt

SEQ ID NO: 2366 - DNA, 44 bp, synthetic construct
  misc_feature 1..44: note = oligonucleotide decoy
  source 1..44: mol_type = other DNA
caggtgacgtaacacgtgtaaataaacaccgatggagccatctt

SEQ ID NO: 2367 - DNA, 44 bp, synthetic construct
  misc_feature 1..44: note = oligonucleotide decoy
  source 1..44: mol_type = other DNA
caggtgacgtaacacgtgtaaataaacagcgatggagccatctt

SEQ ID NO: 2368 - DNA, 44 bp, synthetic construct
  misc_feature 1..44: note = oligonucleotide decoy
  source 1..44: mol_type = other DNA
caggtgacgtaacacgtgtaaataaacatcgatggagccatctt

SEQ ID NO: 2369 - DNA, 44 bp, synthetic construct
  misc_feature 1..44: note = oligonucleotide decoy
  source 1..44: mol_type = other DNA
caggtgatataacacgtgtaaacaaacaacgatggagccatctt

SEQ ID NO: 2370 - DNA, 44 bp, synthetic construct
  misc_feature 1..44: note = oligonucleotide decoy
  source 1..44: mol_type = other DNA
caggtgatataacacgtgtaaacaaacaccgatggagccatctt

SEQ ID NO: 2371 - DNA, 44 bp, synthetic construct
  misc_feature 1..44: note = oligonucleotide decoy
  source 1..44: mol_type = other DNA
caggtgatataacacgtgtaaacaaacagcgatggagccatctt

SEQ ID NO: 2372 - DNA, 44 bp, synthetic construct
  misc_feature 1..44: note = oligonucleotide decoy
  source 1..44: mol_type = other DNA
caggtgatataacacgtgtaaacaaacatcgatggagccatctt

SEQ ID NO: 2373 - DNA, 44 bp, synthetic construct
  misc_feature 1..44: note = oligonucleotide decoy
  source 1..44: mol_type = other DNA
caggtgatataacacgtgtaaataaacaacgatggagccatctt

SEQ ID NO: 2374 - DNA, 44 bp, synthetic construct
  misc_feature 1..44: note = oligonucleotide decoy
  source 1..44: mol_type = other DNA
caggtgatataacacgtgtaaataaacaccgatggagccatctt

SEQ ID NO: 2375 - DNA, 44 bp, synthetic construct
  misc_feature 1..44: note = oligonucleotide decoy
  source 1..44: mol_type = other DNA
caggtgatataacacgtgtaaataaacagcgatggagccatctt

SEQ ID NO: 2376 - DNA, 44 bp, synthetic construct
  misc_feature 1..44: note = oligonucleotide decoy
  source 1..44: mol_type = other DNA
caggtgatataacacgtgtaaataaacatcgatggagccatctt

SEQ ID NO: 2377 - DNA, 44 bp, synthetic construct
  misc_feature 1..44: note = oligonucleotide decoy
  source 1..44: mol_type = other DNA
caggtgatgtaacacgtgtaaacaaacaacgatggagccatctt

SEQ ID NO: 2378 - DNA, 44 bp, synthetic construct
  misc_feature 1..44: note = oligonucleotide decoy
  source 1..44: mol_type = other DNA
caggtgatgtaacacgtgtaaacaaacaccgatggagccatctt

SEQ ID NO: 2379 - DNA, 44 bp, synthetic construct
  misc_feature 1..44: note = oligonucleotide decoy
  source 1..44: mol_type = other DNA
caggtgatgtaacacgtgtaaacaaacagcgatggagccatctt

SEQ ID NO: 2380 - DNA, 44 bp, synthetic construct
  misc_feature 1..44: note = oligonucleotide decoy
  source 1..44: mol_type = other DNA
caggtgatgtaacacgtgtaaacaaacatcgatggagccatctt

SEQ ID NO: 2381 - DNA, 44 bp, synthetic construct
  misc_feature 1..44: note = oligonucleotide decoy
  source 1..44: mol_type = other DNA
caggtgatgtaacacgtgtaaataaacaacgatggagccatctt

SEQ ID NO: 2382 - DNA, 44 bp, synthetic construct
  misc_feature 1..44: note = oligonucleotide decoy
  source 1..44: mol_type = other DNA
caggtgatgtaacacgtgtaaataaacaccgatggagccatctt

SEQ ID NO: 2383 - DNA, 44 bp, synthetic construct
  misc_feature 1..44: note = oligonucleotide decoy
  source 1..44: mol_type = other DNA
caggtgatgtaacacgtgtaaataaacagcgatggagccatctt

SEQ ID NO: 2384 - DNA, 44 bp, synthetic construct
  misc_feature 1..44: note = oligonucleotide decoy
  source 1..44: mol_type = other DNA
caggtgatgtaacacgtgtaaataaacatcgatggagccatctt

SEQ ID NO: 2385 - DNA, 44 bp, synthetic construct
  misc_feature 1..44: note = oligonucleotide decoy
  source 1..44: mol_type = other DNA
caggtgacataacacgtgtaaacaaacaacgatggagccatttt

SEQ ID NO: 2386 - DNA, 44 bp, synthetic construct
  misc_feature 1..44: note = oligonucleotide decoy
  source 1..44: mol_type = other DNA
caggtgacataacacgtgtaaacaaacaccgatggagccatttt

SEQ ID NO: 2387 - DNA, 44 bp, synthetic construct
  misc_feature 1..44: note = oligonucleotide decoy
  source 1..44: mol_type = other DNA
caggtgacataacacgtgtaaacaaacagcgatggagccatttt

SEQ ID NO: 2388 - DNA, 44 bp, synthetic construct
  misc_feature 1..44: note = oligonucleotide decoy
  source 1..44: mol_type = other DNA
caggtgacataacacgtgtaaacaaacatcgatggagccatttt

SEQ ID NO: 2389 - DNA, 44 bp, synthetic construct
  misc_feature 1..44: note = oligonucleotide decoy
  source 1..44: mol_type = other DNA
caggtgacataacacgtgtaaataaacaacgatggagccatttt

SEQ ID NO: 2390 - DNA, 44 bp, synthetic construct
  misc_feature 1..44: note = oligonucleotide decoy
  source 1..44: mol_type = other DNA
caggtgacataacacgtgtaaataaacaccgatggagccatttt

SEQ ID NO: 2391 - DNA, 44 bp, synthetic construct
  misc_feature 1..44: note = oligonucleotide decoy
  source 1..44: mol_type = other DNA
caggtgacataacacgtgtaaataaacagcgatggagccatttt

SEQ ID NO: 2392 - DNA, 44 bp, synthetic construct
  misc_feature 1..44: note = oligonucleotide decoy
  source 1..44: mol_type = other DNA
caggtgacataacacgtgtaaataaacatcgatggagccatttt

SEQ ID NO: 2393 - DNA, 44 bp, synthetic construct
  misc_feature 1..44: note = oligonucleotide decoy
  source 1..44: mol_type = other DNA
caggtgacgtaacacgtgtaaacaaacaacgatggagccatttt

SEQ ID NO: 2394 - DNA, 44 bp, synthetic construct
  misc_feature 1..44: note = oligonucleotide decoy
  source 1..44: mol_type = other DNA
caggtgacgtaacacgtgtaaacaaacaccgatggagccatttt

SEQ ID NO: 2395 - DNA, 44 bp, synthetic construct
  misc_feature 1..44: note = oligonucleotide decoy
  source 1..44: mol_type = other DNA
caggtgacgtaacacgtgtaaacaaacagcgatggagccatttt

SEQ ID NO: 2396 - DNA, 44 bp, synthetic construct
  misc_feature 1..44: note = oligonucleotide decoy
  source 1..44: mol_type = other DNA
caggtgacgtaacacgtgtaaacaaacatcgatggagccatttt

SEQ ID NO: 2397 - DNA, 44 bp, synthetic construct
  misc_feature 1..44: note = oligonucleotide decoy
  source 1..44: mol_type = other DNA
caggtgacgtaacacgtgtaaataaacaacgatggagccatttt

SEQ ID NO: 2398 - DNA, 44 bp, synthetic construct
  misc_feature 1..44: note = oligonucleotide decoy
  source 1..44: mol_type = other DNA
caggtgacgtaacacgtgtaaataaacaccgatggagccatttt

SEQ ID NO: 2399 - DNA, 44 bp, synthetic construct
  misc_feature 1..44: note = oligonucleotide decoy
  source 1..44: mol_type = other DNA
caggtgacgtaacacgtgtaaataaacagcgatggagccatttt

SEQ ID NO: 2400 - DNA, 44 bp, synthetic construct
  misc_feature 1..44: note = oligonucleotide decoy
  source 1..44: mol_type = other DNA
caggtgacgtaacacgtgtaaataaacatcgatggagccatttt

SEQ ID NO: 2401 - DNA, 44 bp, synthetic construct
  misc_feature 1..44: note = oligonucleotide decoy
  source 1..44: mol_type = other DNA
caggtgatataacacgtgtaaacaaacaacgatggagccatttt

SEQ ID NO: 2402 - DNA, 44 bp, synthetic construct
  misc_feature 1..44: note = oligonucleotide decoy
  source 1..44: mol_type = other DNA
caggtgatataacacgtgtaaacaaacaccgatggagccatttt

SEQ ID NO: 2403 - DNA, 44 bp, synthetic construct
  misc_feature 1..44: note = oligonucleotide decoy
  source 1..44: mol_type = other DNA
caggtgatataacacgtgtaaacaaacagcgatggagccatttt

SEQ ID NO: 2404 - DNA, 44 bp, synthetic construct
  misc_feature 1..44: note = oligonucleotide decoy
  source 1..44: mol_type = other DNA
caggtgatataacacgtgtaaacaaacatcgatggagccatttt

SEQ ID NO: 2405 - DNA, 44 bp, synthetic construct
  misc_feature 1..44: note = oligonucleotide decoy
  source 1..44: mol_type = other DNA
caggtgatataacacgtgtaaataaacaacgatggagccatttt

SEQ ID NO: 2406 - DNA, 44 bp, synthetic construct
  misc_feature 1..44: note = oligonucleotide decoy
  source 1..44: mol_type = other DNA
caggtgatataacacgtgtaaataaacaccgatggagccatttt

SEQ ID NO: 2407 - DNA, 44 bp, synthetic construct
  misc_feature 1..44: note = oligonucleotide decoy
  source 1..44: mol_type = other DNA
caggtgatataacacgtgtaaataaacagcgatggagccatttt

SEQ ID NO: 2408 - DNA, 44 bp, synthetic construct
  misc_feature 1..44: note = oligonucleotide decoy
  source 1..44: mol_type = other DNA
caggtgatataacacgtgtaaataaacatcgatggagccatttt

SEQ ID NO: 2409 - DNA, 44 bp, synthetic construct
  misc_feature 1..44: note = oligonucleotide decoy
  source 1..44: mol_type = other DNA
caggtgatgtaacacgtgtaaacaaacaacgatggagccatttt

SEQ ID NO: 2410 - DNA, 44 bp, synthetic construct
  misc_feature 1..44: note = oligonucleotide decoy
  source 1..44: mol_type = other DNA
caggtgatgtaacacgtgtaaacaaacaccgatggagccatttt

SEQ ID NO: 2411 - DNA, 44 bp, synthetic construct
  misc_feature 1..44: note = oligonucleotide decoy
  source 1..44: mol_type = other DNA
caggtgatgtaacacgtgtaaacaaacagcgatggagccatttt

SEQ ID NO: 2412 - DNA, 44 bp, synthetic construct
  misc_feature 1..44: note = oligonucleotide decoy
  source 1..44: mol_type = other DNA
caggtgatgtaacacgtgtaaacaaacatcgatggagccatttt

SEQ ID NO: 2413 - DNA, 44 bp, synthetic construct
  misc_feature 1..44: note = oligonucleotide decoy
  source 1..44: mol_type = other DNA
caggtgatgtaacacgtgtaaataaacaacgatggagccatttt

SEQ ID NO: 2414 - DNA, 44 bp, synthetic construct
  misc_feature 1..44: note = oligonucleotide decoy
  source 1..44: mol_type = other DNA
caggtgatgtaacacgtgtaaataaacaccgatggagccatttt

SEQ ID NO: 2415 - DNA, 44 bp, synthetic construct
  misc_feature 1..44: note = oligonucleotide decoy
  source 1..44: mol_type = other DNA
caggtgatgtaacacgtgtaaataaacagcgatggagccatttt

SEQ ID NO: 2416 - DNA, 44 bp, synthetic construct
  misc_feature 1..44: note = oligonucleotide decoy
  source 1..44: mol_type = other DNA
caggtgatgtaacacgtgtaaataaacatcgatggagccatttt

SEQ ID NO: 2417 - DNA, 44 bp, synthetic construct
  misc_feature 1..44: note = oligonucleotide decoy
  source 1..44: mol_type = other DNA
caggtgacataacacgtgtaaacaaacaacggtggagccatctt

SEQ ID NO: 2418 - DNA, 44 bp, synthetic construct
  misc_feature 1..44: note = oligonucleotide decoy
  source 1..44: mol_type = other DNA
caggtgacataacacgtgtaaacaaacaccggtggagccatctt

SEQ ID NO: 2419 - DNA, 44 bp, synthetic construct
  misc_feature 1..44: note = oligonucleotide decoy
  source 1..44: mol_type = other DNA
caggtgacataacacgtgtaaacaaacagcggtggagccatctt

SEQ ID NO: 2420 - DNA, 44 bp, synthetic construct
  misc_feature 1..44: note = oligonucleotide decoy
  source 1..44: mol_type = other DNA
caggtgacataacacgtgtaaacaaacatcggtggagccatctt

SEQ ID NO: 2421 - DNA, 44 bp, synthetic construct
  misc_feature 1..44: note = oligonucleotide decoy
  source 1..44: mol_type = other DNA
caggtgacataacacgtgtaaataaacaacggtggagccatctt

SEQ ID NO: 2422 - DNA, 44 bp, synthetic construct
  misc_feature 1..44: note = oligonucleotide decoy
  source 1..44: mol_type = other DNA
caggtgacataacacgtgtaaataaacaccggtggagccatctt

SEQ ID NO: 2423 - DNA, 44 bp, synthetic construct
  misc_feature 1..44: note = oligonucleotide decoy
  source 1..44: mol_type = other DNA
caggtgacataacacgtgtaaataaacagcggtggagccatctt

SEQ ID NO: 2424 - DNA, 44 bp, synthetic construct
  misc_feature 1..44: note = oligonucleotide decoy
  source 1..44: mol_type = other DNA
caggtgacataacacgtgtaaataaacatcggtggagccatctt

SEQ ID NO: 2425 - DNA, 44 bp, synthetic construct
  misc_feature 1..44: note = oligonucleotide decoy
  source 1..44: mol_type = other DNA
caggtgacgtaacacgtgtaaacaaacaacggtggagccatctt

SEQ ID NO: 2426 - DNA, 44 bp, synthetic construct
  misc_feature 1..44: note = oligonucleotide decoy
  source 1..44: mol_type = other DNA
caggtgacgtaacacgtgtaaacaaacaccggtggagccatctt

SEQ ID NO: 2427 - DNA, 44 bp, synthetic construct
  misc_feature 1..44: note = oligonucleotide decoy
  source 1..44: mol_type = other DNA
caggtgacgtaacacgtgtaaacaaacagcggtggagccatctt

SEQ ID NO: 2428 - DNA, 44 bp, synthetic construct
  misc_feature 1..44: note = oligonucleotide decoy
  source 1..44: mol_type = other DNA
caggtgacgtaacacgtgtaaacaaacatcggtggagccatctt

SEQ ID NO: 2429 - DNA, 44 bp, synthetic construct
  misc_feature 1..44: note = oligonucleotide decoy
  source 1..44: mol_type = other DNA
caggtgacgtaacacgtgtaaataaacaacggtggagccatctt

SEQ ID NO: 2430 - DNA, 44 bp, synthetic construct
  misc_feature 1..44: note = oligonucleotide decoy
  source 1..44: mol_type = other DNA
caggtgacgtaacacgtgtaaataaacaccggtggagccatctt

SEQ ID NO: 2431 - DNA, 44 bp, synthetic construct
  misc_feature 1..44: note = oligonucleotide decoy
  source 1..44: mol_type = other DNA
caggtgacgtaacacgtgtaaataaacagcggtggagccatctt

SEQ ID NO: 2432 - DNA, 44 bp, synthetic construct
  misc_feature 1..44: note = oligonucleotide decoy
  source 1..44: mol_type = other DNA
caggtgacgtaacacgtgtaaataaacatcggtggagccatctt

SEQ ID NO: 2433 - DNA, 44 bp, synthetic construct
  misc_feature 1..44: note = oligonucleotide decoy
  source 1..44: mol_type = other DNA
caggtgatataacacgtgtaaacaaacaacggtggagccatctt

SEQ ID NO: 2434 - DNA, 44 bp, synthetic construct
  misc_feature 1..44: note = oligonucleotide decoy
  source 1..44: mol_type = other DNA
caggtgatataacacgtgtaaacaaacaccggtggagccatctt

SEQ ID NO: 2435 - DNA, 44 bp, synthetic construct
  misc_feature 1..44: note = oligonucleotide decoy
  source 1..44: mol_type = other DNA
caggtgatataacacgtgtaaacaaacagcggtggagccatctt

SEQ ID NO: 2436 - DNA, 44 bp, synthetic construct
  misc_feature 1..44: note = oligonucleotide decoy
  source 1..44: mol_type = other DNA
caggtgatataacacgtgtaaacaaacatcggtggagccatctt

SEQ ID NO: 2437 - DNA, 44 bp, synthetic construct
  misc_feature 1..44: note = oligonucleotide decoy
  source 1..44: mol_type = other DNA
caggtgatataacacgtgtaaataaacaacggtggagccatctt

SEQ ID NO: 2438 - DNA, 44 bp, synthetic construct
  misc_feature 1..44: note = oligonucleotide decoy
  source 1..44: mol_type = other DNA
caggtgatataacacgtgtaaataaacaccggtggagccatctt

SEQ ID NO: 2439 - DNA, 44 bp, synthetic construct
  misc_feature 1..44: note = oligonucleotide decoy
  source 1..44: mol_type = other DNA
caggtgatataacacgtgtaaataaacagcggtggagccatctt

SEQ ID NO: 2440 - DNA, 44 bp, synthetic construct
  misc_feature 1..44: note = oligonucleotide decoy
  source 1..44: mol_type = other DNA
caggtgatataacacgtgtaaataaacatcggtggagccatctt

SEQ ID NO: 2441 - DNA, 44 bp, synthetic construct
  misc_feature 1..44: note = oligonucleotide decoy
  source 1..44: mol_type = other DNA
caggtgatgtaacacgtgtaaacaaacaacggtggagccatctt

SEQ ID NO: 2442 - DNA, 44 bp, synthetic construct
  misc_feature 1..44: note = oligonucleotide decoy
  source 1..44: mol_type = other DNA
caggtgatgtaacacgtgtaaacaaacaccggtggagccatctt

SEQ ID NO: 2443 - DNA, 44 bp, synthetic construct
  misc_feature 1..44: note = oligonucleotide decoy
  source 1..44: mol_type = other DNA
caggtgatgtaacacgtgtaaacaaacagcggtggagccatctt

SEQ ID NO: 2444 - DNA, 44 bp, synthetic construct
  misc_feature 1..44: note = oligonucleotide decoy
  source 1..44: mol_type = other DNA
caggtgatgtaacacgtgtaaacaaacatcggtggagccatctt

SEQ ID NO: 2445 - DNA, 44 bp, synthetic construct
  misc_feature 1..44: note = oligonucleotide decoy
  source 1..44: mol_type = other DNA
caggtgatgtaacacgtgtaaataaacaacggtggagccatctt

SEQ ID NO: 2446 - DNA, 44 bp, synthetic construct
  misc_feature 1..44: note = oligonucleotide decoy
  source 1..44: mol_type = other DNA
caggtgatgtaacacgtgtaaataaacaccggtggagccatctt

SEQ ID NO: 2447 - DNA, 44 bp, synthetic construct
  misc_feature 1..44: note = oligonucleotide decoy
  source 1..44: mol_type = other DNA
caggtgatgtaacacgtgtaaataaacagcggtggagccatctt

SEQ ID NO: 2448 - DNA, 44 bp, synthetic construct
  misc_feature 1..44: note = oligonucleotide decoy
  source 1..44: mol_type = other DNA
caggtgatgtaacacgtgtaaataaacatcggtggagccatctt

SEQ ID NO: 2449 - DNA, 44 bp, synthetic construct
  misc_feature 1..44: note = oligonucleotide decoy
  source 1..44: mol_type = other DNA
caggtgacataacacgtgtaaacaaacaacggtggagccatttt

SEQ ID NO: 2450 - DNA, 44 bp, synthetic construct
  misc_feature 1..44: note = oligonucleotide decoy
  source 1..44: mol_type = other DNA
caggtgacataacacgtgtaaacaaacaccggtggagccatttt

SEQ ID NO: 2451 - DNA, 44 bp, synthetic construct
  misc_feature 1..44: note = oligonucleotide decoy
  source 1..44: mol_type = other DNA
caggtgacataacacgtgtaaacaaacagcggtggagccatttt

SEQ ID NO: 2452 - DNA, 44 bp, synthetic construct
  misc_feature 1..44: note = oligonucleotide decoy
  source 1..44: mol_type = other DNA
caggtgacataacacgtgtaaacaaacatcggtggagccatttt

SEQ ID NO: 2453 - DNA, 44 bp, synthetic construct
  misc_feature 1..44: note = oligonucleotide decoy
  source 1..44: mol_type = other DNA
caggtgacataacacgtgtaaataaacaacggtggagccatttt

SEQ ID NO: 2454 - DNA, 44 bp, synthetic construct
  misc_feature 1..44: note = oligonucleotide decoy
  source 1..44: mol_type = other DNA
caggtgacataacacgtgtaaataaacaccggtggagccatttt

SEQ ID NO: 2455 - DNA, 44 bp, synthetic construct
  misc_feature 1..44: note = oligonucleotide decoy
  source 1..44: mol_type = other DNA
caggtgacataacacgtgtaaataaacagcggtggagccatttt

SEQ ID NO: 2456 - DNA, 44 bp, synthetic construct
  misc_feature 1..44: note = oligonucleotide decoy
  source 1..44: mol_type = other DNA
caggtgacataacacgtgtaaataaacatcggtggagccatttt

SEQ ID NO: 2457 - DNA, 44 bp, synthetic construct
  misc_feature 1..44: note = oligonucleotide decoy
  source 1..44: mol_type = other DNA
caggtgacgtaacacgtgtaaacaaacaacggtggagccatttt

SEQ ID NO: 2458 - DNA, 44 bp, synthetic construct
  misc_feature 1..44: note = oligonucleotide decoy
  source 1..44: mol_type = other DNA
caggtgacgtaacacgtgtaaacaaacaccggtggagccatttt

SEQ ID NO: 2459 - DNA, 44 bp, synthetic construct
  misc_feature 1..44: note = oligonucleotide decoy
  source 1..44: mol_type = other DNA
caggtgacgtaacacgtgtaaacaaacagcggtggagccatttt

SEQ ID NO: 2460 - DNA, 44 bp, synthetic construct
  misc_feature 1..44: note = oligonucleotide decoy
  source 1..44: mol_type = other DNA
caggtgacgtaacacgtgtaaacaaacatcggtggagccatttt

SEQ ID NO: 2461 - DNA, 44 bp, synthetic construct
  misc_feature 1..44: note = oligonucleotide decoy
  source 1..44: mol_type = other DNA
caggtgacgtaacacgtgtaaataaacaacggtggagccatttt

SEQ ID NO: 2462 - DNA, 44 bp, synthetic construct
  misc_feature 1..44: note = oligonucleotide decoy
  source 1..44: mol_type = other DNA
caggtgacgtaacacgtgtaaataaacaccggtggagccatttt

SEQ ID NO: 2463 - DNA, 44 bp, synthetic construct
  misc_feature 1..44: note = oligonucleotide decoy
  source 1..44: mol_type = other DNA
caggtgacgtaacacgtgtaaataaacagcggtggagccatttt

SEQ ID NO: 2464 - DNA, 44 bp, synthetic construct
  misc_feature 1..44: note = oligonucleotide decoy
  source 1..44: mol_type = other DNA
caggtgacgtaacacgtgtaaataaacatcggtggagccatttt

SEQ ID NO: 2465 - DNA, 44 bp, synthetic construct
  misc_feature 1..44: note = oligonucleotide decoy
  source 1..44: mol_type = other DNA
caggtgatataacacgtgtaaacaaacaacggtggagccatttt

SEQ ID NO: 2466 - DNA, 44 bp, synthetic construct
  misc_feature 1..44: note = oligonucleotide decoy
  source 1..44: mol_type = other DNA
caggtgatataacacgtgtaaacaaacaccggtggagccatttt

SEQ ID NO: 2467 - DNA, 44 bp, synthetic construct
  misc_feature 1..44: note = oligonucleotide decoy
  source 1..44: mol_type = other DNA
caggtgatataacacgtgtaaacaaacagcggtggagccatttt

SEQ ID NO: 2468 - DNA, 44 bp, synthetic construct
  misc_feature 1..44: note = oligonucleotide decoy
  source 1..44: mol_type = other DNA
caggtgatataacacgtgtaaacaaacatcggtggagccatttt

SEQ ID NO: 2469 - DNA, 44 bp, synthetic construct
  misc_feature 1..44: note = oligonucleotide decoy
  source 1..44: mol_type = other DNA
caggtgatataacacgtgtaaataaacaacggtggagccatttt

SEQ ID NO: 2470 - DNA, 44 bp, synthetic construct
  misc_feature 1..44: note = oligonucleotide decoy
  source 1..44: mol_type = other DNA
caggtgatataacacgtgtaaataaacaccggtggagccatttt

SEQ ID NO: 2471 - DNA, 44 bp, synthetic construct
  misc_feature 1..44: note = oligonucleotide decoy
  source 1..44: mol_type = other DNA
caggtgatataacacgtgtaaataaacagcggtggagccatttt

SEQ ID NO: 2472 - DNA, 44 bp, synthetic construct
  misc_feature 1..44: note = oligonucleotide decoy
  source 1..44: mol_type = other DNA
caggtgatataacacgtgtaaataaacatcggtggagccatttt

SEQ ID NO: 2473 - DNA, 44 bp, synthetic construct
  misc_feature 1..44: note = oligonucleotide decoy
  source 1..44: mol_type = other DNA
caggtgatgtaacacgtgtaaacaaacaacggtggagccatttt

SEQ ID NO: 2474 - DNA, 44 bp, synthetic construct
  misc_feature 1..44: note = oligonucleotide decoy
  source 1..44: mol_type = other DNA
caggtgatgtaacacgtgtaaacaaacaccggtggagccatttt

SEQ ID NO: 2475 - DNA, 44 bp, synthetic construct
  misc_feature 1..44: note = oligonucleotide decoy
  source 1..44: mol_type = other DNA
caggtgatgtaacacgtgtaaacaaacagcggtggagccatttt

SEQ ID NO: 2476 - DNA, 44 bp, synthetic construct
  misc_feature 1..44: note = oligonucleotide decoy
  source 1..44: mol_type = other DNA
caggtgatgtaacacgtgtaaacaaacatcggtggagccatttt

SEQ ID NO: 2477 - DNA, 44 bp, synthetic construct
  misc_feature 1..44: note = oligonucleotide decoy
  source 1..44: mol_type = other DNA
caggtgatgtaacacgtgtaaataaacaacggtggagccatttt

SEQ ID NO: 2478 - DNA, 44 bp, synthetic construct
  misc_feature 1..44: note = oligonucleotide decoy
  source 1..44: mol_type = other DNA
caggtgatgtaacacgtgtaaataaacaccggtggagccatttt

SEQ ID NO: 2479 - DNA, 44 bp, synthetic construct
  misc_feature 1..44: note = oligonucleotide decoy
  source 1..44: mol_type = other DNA
caggtgatgtaacacgtgtaaataaacagcggtggagccatttt

SEQ ID NO: 2480 - DNA, 44 bp, synthetic construct
  misc_feature 1..44: note = oligonucleotide decoy
  source 1..44: mol_type = other DNA
caggtgatgtaacacgtgtaaataaacatcggtggagccatttt

SEQ ID NO: 2481 - DNA, 44 bp, synthetic construct
  misc_feature 1..44: note = oligonucleotide decoy
  source 1..44: mol_type = other DNA
cacctgttacatcacgtgtaaacaaacaacgatggagccatctt

SEQ ID NO: 2482 - DNA, 44 bp, synthetic construct
  misc_feature 1..44: note = oligonucleotide decoy
  source 1..44: mol_type = other DNA
cacctgttacatcacgtgtaaacaaacaccgatggagccatctt

SEQ ID NO: 2483 - DNA, 44 bp, synthetic construct
  misc_feature 1..44: note = oligonucleotide decoy
  source 1..44: mol_type = other DNA
cacctgttacatcacgtgtaaacaaacagcgatggagccatctt

SEQ ID NO: 2484 - DNA, 44 bp, synthetic construct
  misc_feature 1..44: note = oligonucleotide decoy
  source 1..44: mol_type = other DNA
cacctgttacatcacgtgtaaacaaacatcgatggagccatctt

SEQ ID NO: 2485 - DNA, 44 bp, synthetic construct
  misc_feature 1..44: note = oligonucleotide decoy
  source 1..44: mol_type = other DNA
cacctgttacatcacgtgtaaataaacaacgatggagccatctt

SEQ ID NO: 2486 - DNA, 44 bp, synthetic construct
  misc_feature 1..44: note = oligonucleotide decoy
  source 1..44: mol_type = other DNA
cacctgttacatcacgtgtaaataaacaccgatggagccatctt

SEQ ID NO: 2487 - DNA, 44 bp, synthetic construct
  misc_feature 1..44: note = oligonucleotide decoy
  source 1..44: mol_type = other DNA
cacctgttacatcacgtgtaaataaacagcgatggagccatctt

SEQ ID NO: 2488 - DNA, 44 bp, synthetic construct
  misc_feature 1..44: note = oligonucleotide decoy
  source 1..44: mol_type = other DNA
cacctgttacatcacgtgtaaataaacatcgatggagccatctt

SEQ ID NO: 2489 - DNA, 44 bp, synthetic construct
  misc_feature 1..44: note = oligonucleotide decoy
  source 1..44: mol_type = other DNA
cacctgttacgtcacgtgtaaacaaacaacgatggagccatctt

SEQ ID NO: 2490 - DNA, 44 bp, synthetic construct
  misc_feature 1..44: note = oligonucleotide decoy
  source 1..44: mol_type = other DNA
cacctgttacgtcacgtgtaaacaaacaccgatggagccatctt

SEQ ID NO: 2491 - DNA, 44 bp, synthetic construct
  misc_feature 1..44: note = oligonucleotide decoy
  source 1..44: mol_type = other DNA
cacctgttacgtcacgtgtaaacaaacagcgatggagccatctt

SEQ ID NO: 2492 - DNA, 44 bp, synthetic construct
  misc_feature 1..44: note = oligonucleotide decoy
  source 1..44: mol_type = other DNA
cacctgttacgtcacgtgtaaacaaacatcgatggagccatctt

SEQ ID NO: 2493 - DNA, 44 bp, synthetic construct
  misc_feature 1..44: note = oligonucleotide decoy
  source 1..44: mol_type = other DNA
cacctgttacgtcacgtgtaaataaacaacgatggagccatctt

SEQ ID NO: 2494 - DNA, 44 bp, synthetic construct
  misc_feature 1..44: note = oligonucleotide decoy
  source 1..44: mol_type = other DNA
cacctgttacgtcacgtgtaaataaacaccgatggagccatctt

SEQ ID NO: 2495 - DNA, 44 bp, synthetic construct
  misc_feature 1..44: note = oligonucleotide decoy
  source 1..44: mol_type = other DNA
cacctgttacgtcacgtgtaaataaacagcgatggagccatctt

SEQ ID NO: 2496 - DNA, 44 bp, synthetic construct
  misc_feature 1..44: note = oligonucleotide decoy
  source 1..44: mol_type = other DNA
cacctgttacgtcacgtgtaaataaacatcgatggagccatctt

SEQ ID NO: 2497 - DNA, 44 bp, synthetic construct
  misc_feature 1..44: note = oligonucleotide decoy
  source 1..44: mol_type = other DNA
cacctgttatatcacgtgtaaacaaacaacgatggagccatctt

SEQ ID NO: 2498 - DNA, 44 bp, synthetic construct
  misc_feature 1..44: note = oligonucleotide decoy
  source 1..44: mol_type = other DNA
cacctgttatatcacgtgtaaacaaacaccgatggagccatctt

SEQ ID NO: 2499 - DNA, 44 bp, synthetic construct
  misc_feature 1..44: note = oligonucleotide decoy
  source 1..44: mol_type = other DNA
cacctgttatatcacgtgtaaacaaacagcgatggagccatctt

SEQ ID NO: 2500 - DNA, 44 bp, synthetic construct
  misc_feature 1..44: note = oligonucleotide decoy
  source 1..44: mol_type = other DNA
cacctgttatatcacgtgtaaacaaacatcgatggagccatctt

SEQ ID NO: 2501 - DNA, 44 bp, synthetic construct
  misc_feature 1..44: note = oligonucleotide decoy
  source 1..44: mol_type = other DNA
cacctgttatatcacgtgtaaataaacaacgatggagccatctt

SEQ ID NO: 2502 - DNA, 44 bp, synthetic construct
  misc_feature 1..44: note = oligonucleotide decoy
  source 1..44: mol_type = other DNA
cacctgttatatcacgtgtaaataaacaccgatggagccatctt

SEQ ID NO: 2503 - DNA, 44 bp, synthetic construct
  misc_feature 1..44: note = oligonucleotide decoy
  source 1..44: mol_type = other DNA
cacctgttatatcacgtgtaaataaacagcgatggagccatctt

SEQ ID NO: 2504 - DNA, 44 bp, synthetic construct
  misc_feature 1..44: note = oligonucleotide decoy
  source 1..44: mol_type = other DNA
cacctgttatatcacgtgtaaataaacatcgatggagccatctt

SEQ ID NO: 2505 - DNA, 44 bp, synthetic construct
  misc_feature 1..44: note = oligonucleotide decoy
  source 1..44: mol_type = other DNA
cacctgttatgtcacgtgtaaacaaacaacgatggagccatctt

SEQ ID NO: 2506 - DNA, 44 bp, synthetic construct
  misc_feature 1..44: note = oligonucleotide decoy
  source 1..44: mol_type = other DNA
cacctgttatgtcacgtgtaaacaaacaccgatggagccatctt

SEQ ID NO: 2507 - DNA, 44 bp, synthetic construct
  misc_feature 1..44: note = oligonucleotide decoy
  source 1..44: mol_type = other DNA
cacctgttatgtcacgtgtaaacaaacagcgatggagccatctt

SEQ ID NO: 2508 - DNA, 44 bp, synthetic construct
  misc_feature 1..44: note = oligonucleotide decoy
  source 1..44: mol_type = other DNA
cacctgttatgtcacgtgtaaacaaacatcgatggagccatctt

SEQ ID NO: 2509 - DNA, 44 bp, synthetic construct
  misc_feature 1..44: note = oligonucleotide decoy
  source 1..44: mol_type = other DNA
cacctgttatgtcacgtgtaaataaacaacgatggagccatctt

SEQ ID NO: 2510 - DNA, 44 bp, synthetic construct
  misc_feature 1..44: note = oligonucleotide decoy
  source 1..44: mol_type = other DNA
cacctgttatgtcacgtgtaaataaacaccgatggagccatctt

SEQ ID NO: 2511 - DNA, 44 bp, synthetic construct
  misc_feature 1..44: note = oligonucleotide decoy
  source 1..44: mol_type = other DNA
cacctgttatgtcacgtgtaaataaacagcgatggagccatctt

SEQ ID NO: 2512 - DNA, 44 bp, synthetic construct
  misc_feature 1..44: note = oligonucleotide decoy
  source 1..44: mol_type = other DNA
cacctgttatgtcacgtgtaaataaacatcgatggagccatctt

SEQ ID NO: 2513 - DNA, 44 bp, synthetic construct
  misc_feature 1..44: note = oligonucleotide decoy
  source 1..44: mol_type = other DNA
cacctgttacatcacgtgtaaacaaacaacgatggagccatttt

SEQ ID NO: 2514 - DNA, 44 bp, synthetic construct
  misc_feature 1..44: note = oligonucleotide decoy
  source 1..44: mol_type = other DNA
cacctgttacatcacgtgtaaacaaacaccgatggagccatttt

SEQ ID NO: 2515 - DNA, 44 bp, synthetic construct
  misc_feature 1..44: note = oligonucleotide decoy
  source 1..44: mol_type = other DNA
cacctgttacatcacgtgtaaacaaacagcgatggagccatttt

SEQ ID NO: 2516 - DNA, 44 bp, synthetic construct
  misc_feature 1..44: note = oligonucleotide decoy
  source 1..44: mol_type = other DNA
cacctgttacatcacgtgtaaacaaacatcgatggagccatttt

SEQ ID NO: 2517 - DNA, 44 bp, synthetic construct
  misc_feature 1..44: note = oligonucleotide decoy
  source 1..44: mol_type = other DNA
cacctgttacatcacgtgtaaataaacaacgatggagccatttt

SEQ ID NO: 2518 - DNA, 44 bp, synthetic construct
  misc_feature 1..44: note = oligonucleotide decoy
  source 1..44: mol_type = other DNA
cacctgttacatcacgtgtaaataaacaccgatggagccatttt

SEQ ID NO: 2519 - DNA, 44 bp, synthetic construct
  misc_feature 1..44: note = oligonucleotide decoy
  source 1..44: mol_type = other DNA
cacctgttacatcacgtgtaaataaacagcgatggagccatttt

SEQ ID NO: 2520 - DNA, 44 bp, synthetic construct
  misc_feature 1..44: note = oligonucleotide decoy
  source 1..44: mol_type = other DNA
cacctgttacatcacgtgtaaataaacatcgatggagccatttt

SEQ ID NO: 2521 - DNA, 44 bp, synthetic construct
  misc_feature 1..44: note = oligonucleotide decoy
  source 1..44: mol_type = other DNA
cacctgttacgtcacgtgtaaacaaacaacgatggagccatttt

SEQ ID NO: 2522 - DNA, 44 bp, synthetic construct
  misc_feature 1..44: note = oligonucleotide decoy
  source 1..44: mol_type = other DNA
cacctgttacgtcacgtgtaaacaaacaccgatggagccatttt

SEQ ID NO: 2523 - DNA, 44 bp, synthetic construct
  misc_feature 1..44: note = oligonucleotide decoy
  source 1..44: mol_type = other DNA
cacctgttacgtcacgtgtaaacaaacagcgatggagccatttt

SEQ ID NO: 2524 - DNA, 44 bp, synthetic construct
  misc_feature 1..44: note = oligonucleotide decoy
  source 1..44: mol_type = other DNA
cacctgttacgtcacgtgtaaacaaacatcgatggagccatttt

SEQ ID NO: 2525 - DNA, 44 bp, synthetic construct
  misc_feature 1..44: note = oligonucleotide decoy
  source 1..44: mol_type = other DNA
cacctgttacgtcacgtgtaaataaacaacgatggagccatttt

SEQ ID NO: 2526 - DNA, 44 bp, synthetic construct
  misc_feature 1..44: note = oligonucleotide decoy
  source 1..44: mol_type = other DNA
cacctgttacgtcacgtgtaaataaacaccgatggagccatttt

SEQ ID NO: 2527 - DNA, 44 bp, synthetic construct
  misc_feature 1..44: note = oligonucleotide decoy
  source 1..44: mol_type = other DNA
cacctgttacgtcacgtgtaaataaacagcgatggagccatttt

SEQ ID NO: 2528 - DNA, 44 bp, synthetic construct
  misc_feature 1..44: note = oligonucleotide decoy
  source 1..44: mol_type = other DNA
cacctgttacgtcacgtgtaaataaacatcgatggagccatttt

SEQ ID NO: 2529 - DNA, 44 bp, synthetic construct
  misc_feature 1..44: note = oligonucleotide decoy
  source 1..44: mol_type = other DNA
cacctgttatatcacgtgtaaacaaacaacgatggagccatttt

SEQ ID NO: 2530 - DNA, 44 bp, synthetic construct
  misc_feature 1..44: note = oligonucleotide decoy
  source 1..44: mol_type = other DNA
cacctgttatatcacgtgtaaacaaacaccgatggagccatttt

SEQ ID NO: 2531 - DNA, 44 bp, synthetic construct
  misc_feature 1..44: note = oligonucleotide decoy
  source 1..44: mol_type = other DNA
cacctgttatatcacgtgtaaacaaacagcgatggagccatttt

SEQ ID NO: 2532 - DNA, 44 bp, synthetic construct
  misc_feature 1..44: note = oligonucleotide decoy
  source 1..44: mol_type = other DNA
cacctgttatatcacgtgtaaacaaacatcgatggagccatttt

SEQ ID NO: 2533 - DNA, 44 bp, synthetic construct
  misc_feature 1..44: note = oligonucleotide decoy
  source 1..44: mol_type = other DNA
cacctgttatatcacgtgtaaataaacaacgatggagccatttt

SEQ ID NO: 2534 - DNA, 44 bp, synthetic construct
  misc_feature 1..44: note = oligonucleotide decoy
  source 1..44: mol_type = other DNA
cacctgttatatcacgtgtaaataaacaccgatggagccatttt

SEQ ID NO: 2535 - DNA, 44 bp, synthetic construct
  misc_feature 1..44: note = oligonucleotide decoy
  source 1..44: mol_type = other DNA
cacctgttatatcacgtgtaaataaacagcgatggagccatttt

SEQ ID NO: 2536 - DNA, 44 bp, synthetic construct
  misc_feature 1..44: note = oligonucleotide decoy
  source 1..44: mol_type = other DNA
cacctgttatatcacgtgtaaataaacatcgatggagccatttt

SEQ ID NO: 2537 - DNA, 44 bp, synthetic construct
  misc_feature 1..44: note = oligonucleotide decoy
  source 1..44: mol_type = other DNA
cacctgttatgtcacgtgtaaacaaacaacgatggagccatttt

SEQ ID NO: 2538 - DNA, 44 bp, synthetic construct
  misc_feature 1..44: note = oligonucleotide decoy
  source 1..44: mol_type = other DNA
cacctgttatgtcacgtgtaaacaaacaccgatggagccatttt

SEQ ID NO: 2539 - DNA, 44 bp, synthetic construct
  misc_feature 1..44: note = oligonucleotide decoy
  source 1..44: mol_type = other DNA
cacctgttatgtcacgtgtaaacaaacagcgatggagccatttt

SEQ ID NO: 2540 - DNA, 44 bp, synthetic construct
  misc_feature 1..44: note = oligonucleotide decoy
  source 1..44: mol_type = other DNA
cacctgttatgtcacgtgtaaacaaacatcgatggagccatttt

SEQ ID NO: 2541 - DNA, 44 bp, synthetic construct
  misc_feature 1..44: note = oligonucleotide decoy
  source 1..44: mol_type = other DNA
cacctgttatgtcacgtgtaaataaacaacgatggagccatttt

SEQ ID NO: 2542 - DNA, 44 bp, synthetic construct
  misc_feature 1..44: note = oligonucleotide decoy
  source 1..44: mol_type = other DNA
cacctgttatgtcacgtgtaaataaacaccgatggagccatttt

SEQ ID NO: 2543 - DNA, 44 bp, synthetic construct
  misc_feature 1..44: note = oligonucleotide decoy
  source 1..44: mol_type = other DNA
cacctgttatgtcacgtgtaaataaacagcgatggagccatttt

SEQ ID NO: 2544 - DNA, 44 bp, synthetic construct
  misc_feature 1..44: note = oligonucleotide decoy
  source 1..44: mol_type = other DNA
cacctgttatgtcacgtgtaaataaacatcgatggagccatttt

SEQ ID NO: 2545 - DNA, 44 bp, synthetic construct
  misc_feature 1..44: note = oligonucleotide decoy
  source 1..44: mol_type = other DNA
cacctgttacatcacgtgtaaacaaacaacggtggagccatctt

SEQ ID NO: 2546 - DNA, 44 bp, synthetic construct
  misc_feature 1..44: note = oligonucleotide decoy
  source 1..44: mol_type = other DNA
cacctgttacatcacgtgtaaacaaacaccggtggagccatctt

SEQ ID NO: 2547 - DNA, 44 bp, synthetic construct
  misc_feature 1..44: note = oligonucleotide decoy
  source 1..44: mol_type = other DNA
cacctgttacatcacgtgtaaacaaacagcggtggagccatctt

SEQ ID NO: 2548 - DNA, 44 bp, synthetic construct
  misc_feature 1..44: note = oligonucleotide decoy
  source 1..44: mol_type = other DNA
cacctgttacatcacgtgtaaacaaacatcggtggagccatctt

SEQ ID NO: 2549 - DNA, 44 bp, synthetic construct
  misc_feature 1..44: note = oligonucleotide decoy
  source 1..44: mol_type = other DNA
cacctgttacatcacgtgtaaataaacaacggtggagccatctt

SEQ ID NO: 2550 - DNA, 44 bp, synthetic construct
  misc_feature 1..44: note = oligonucleotide decoy
  source 1..44: mol_type = other DNA
cacctgttacatcacgtgtaaataaacaccggtggagccatctt

SEQ ID NO: 2551 - DNA, 44 bp, synthetic construct
  misc_feature 1..44: note = oligonucleotide decoy
  source 1..44: mol_type = other DNA
cacctgttacatcacgtgtaaataaacagcggtggagccatctt

SEQ ID NO: 2552 - DNA, 44 bp, synthetic construct
  misc_feature 1..44: note = oligonucleotide decoy
  source 1..44: mol_type = other DNA
cacctgttacatcacgtgtaaataaacatcggtggagccatctt

SEQ ID NO: 2553 - DNA, 44 bp, synthetic construct
  misc_feature 1..44: note = oligonucleotide decoy
  source 1..44: mol_type = other DNA
cacctgttacgtcacgtgtaaacaaacaacggtggagccatctt

SEQ ID NO: 2554 - DNA, 44 bp, synthetic construct
  misc_feature 1..44: note = oligonucleotide decoy
  source 1..44: mol_type = other DNA
cacctgttacgtcacgtgtaaacaaacaccggtggagccatctt

SEQ ID NO: 2555 - DNA, 44 bp, synthetic construct
  misc_feature 1..44: note = oligonucleotide decoy
  source 1..44: mol_type = other DNA
cacctgttacgtcacgtgtaaacaaacagcggtggagccatctt

SEQ ID NO: 2556 - DNA, 44 bp, synthetic construct
  misc_feature 1..44: note = oligonucleotide decoy
  source 1..44: mol_type = other DNA
cacctgttacgtcacgtgtaaacaaacatcggtggagccatctt

SEQ ID NO: 2557 - DNA, 44 bp, synthetic construct
  misc_feature 1..44: note = oligonucleotide decoy
  source 1..44: mol_type = other DNA
cacctgttacgtcacgtgtaaataaacaacggtggagccatctt

SEQ ID NO: 2558 - DNA, 44 bp, synthetic construct
  misc_feature 1..44: note = oligonucleotide decoy
  source 1..44: mol_type = other DNA
cacctgttacgtcacgtgtaaataaacaccggtggagccatctt

SEQ ID NO: 2559 - DNA, 44 bp, synthetic construct
  misc_feature 1..44: note = oligonucleotide decoy
  source 1..44: mol_type = other DNA
cacctgttacgtcacgtgtaaataaacagcggtggagccatctt

SEQ ID NO: 2560 - DNA, 44 bp, synthetic construct
  misc_feature 1..44: note = oligonucleotide decoy
  source 1..44: mol_type = other DNA
cacctgttacgtcacgtgtaaataaacatcggtggagccatctt

SEQ ID NO: 2561 - DNA, 44 bp, synthetic construct
  misc_feature 1..44: note = oligonucleotide decoy
  source 1..44: mol_type = other DNA
cacctgttatatcacgtgtaaacaaacaacggtggagccatctt

SEQ ID NO: 2562 - DNA, 44 bp, synthetic construct
  misc_feature 1..44: note = oligonucleotide decoy
  source 1..44: mol_type = other DNA
cacctgttatatcacgtgtaaacaaacaccggtggagccatctt

SEQ ID NO: 2563 - DNA, 44 bp, synthetic construct
  misc_feature 1..44: note = oligonucleotide decoy
  source 1..44: mol_type = other DNA
cacctgttatatcacgtgtaaacaaacagcggtggagccatctt

SEQ ID NO: 2564 - DNA, 44 bp, synthetic construct
  misc_feature 1..44: note = oligonucleotide decoy
  source 1..44: mol_type = other DNA
cacctgttatatcacgtgtaaacaaacatcggtggagccatctt

SEQ ID NO: 2565 - DNA, 44 bp, synthetic construct
  misc_feature 1..44: note = oligonucleotide decoy
  source 1..44: mol_type = other DNA
cacctgttatatcacgtgtaaataaacaacggtggagccatctt

SEQ ID NO: 2566 - DNA, 44 bp, synthetic construct
  misc_feature 1..44: note = oligonucleotide decoy
  source 1..44: mol_type = other DNA
cacctgttatatcacgtgtaaataaacaccggtggagccatctt

SEQ ID NO: 2567 - DNA, 44 bp, synthetic construct
  misc_feature 1..44: note = oligonucleotide decoy
  source 1..44: mol_type = other DNA
cacctgttatatcacgtgtaaataaacagcggtggagccatctt

SEQ ID NO: 2568 - DNA, 44 bp, synthetic construct
  misc_feature 1..44: note = oligonucleotide decoy
  source 1..44: mol_type = other DNA
cacctgttatatcacgtgtaaataaacatcggtggagccatctt

SEQ ID NO: 2569 - DNA, 44 bp, synthetic construct
  misc_feature 1..44: note = oligonucleotide decoy
  source 1..44: mol_type = other DNA
cacctgttatgtcacgtgtaaacaaacaacggtggagccatctt

SEQ ID NO: 2570 - DNA, 44 bp, synthetic construct
  misc_feature 1..44: note = oligonucleotide decoy
  source 1..44: mol_type = other DNA
cacctgttatgtcacgtgtaaacaaacaccggtggagccatctt

SEQ ID NO: 2571 - DNA, 44 bp, synthetic construct
  misc_feature 1..44: note = oligonucleotide decoy
  source 1..44: mol_type = other DNA
cacctgttatgtcacgtgtaaacaaacagcggtggagccatctt

SEQ ID NO: 2572 - DNA, 44 bp, synthetic construct
  misc_feature 1..44: note = oligonucleotide decoy
  source 1..44: mol_type = other DNA
cacctgttatgtcacgtgtaaacaaacatcggtggagccatctt

SEQ ID NO: 2573 - DNA, 44 bp, synthetic construct
  misc_feature 1..44: note = oligonucleotide decoy
  source 1..44: mol_type = other DNA
cacctgttatgtcacgtgtaaataaacaacggtggagccatctt

SEQ ID NO: 2574 - DNA, 44 bp, synthetic construct
  misc_feature 1..44: note = oligonucleotide decoy
  source 1..44: mol_type = other DNA
cacctgttatgtcacgtgtaaataaacaccggtggagccatctt

SEQ ID NO: 2575 - DNA, 44 bp, synthetic construct
  misc_feature 1..44: note = oligonucleotide decoy
  source 1..44: mol_type = other DNA
cacctgttatgtcacgtgtaaataaacagcggtggagccatctt

SEQ ID NO: 2576 - DNA, 44 bp, synthetic construct
  misc_feature 1..44: note = oligonucleotide decoy
  source 1..44: mol_type = other DNA
cacctgttatgtcacgtgtaaataaacatcggtggagccatctt

SEQ ID NO: 2577 - DNA, 44 bp, synthetic construct
  misc_feature 1..44: note = oligonucleotide decoy
  source 1..44: mol_type = other DNA
cacctgttacatcacgtgtaaacaaacaacggtggagccatttt

SEQ ID NO: 2578 - DNA, 44 bp, synthetic construct
  misc_feature 1..44: note = oligonucleotide decoy
  source 1..44: mol_type = other DNA
cacctgttacatcacgtgtaaacaaacaccggtggagccatttt

SEQ ID NO: 2579 - DNA, 44 bp, synthetic construct
  misc_feature 1..44: note = oligonucleotide decoy
  source 1..44: mol_type = other DNA
cacctgttacatcacgtgtaaacaaacagcggtggagccatttt

SEQ ID NO: 2580 - DNA, 44 bp, synthetic construct
  misc_feature 1..44: note = oligonucleotide decoy
  source 1..44: mol_type = other DNA
cacctgttacatcacgtgtaaacaaacatcggtggagccatttt

SEQ ID NO: 2581 - DNA, 44 bp, synthetic construct
  misc_feature 1..44: note = oligonucleotide decoy
  source 1..44: mol_type = other DNA
cacctgttacatcacgtgtaaataaacaacggtggagccatttt

SEQ ID NO: 2582 - DNA, 44 bp, synthetic construct
  misc_feature 1..44: note = oligonucleotide decoy
  source 1..44: mol_type = other DNA
cacctgttacatcacgtgtaaataaacaccggtggagccatttt

SEQ ID NO: 2583 - DNA, 44 bp, synthetic construct
  misc_feature 1..44: note = oligonucleotide decoy
  source 1..44: mol_type = other DNA
cacctgttacatcacgtgtaaataaacagcggtggagccatttt

SEQ ID NO: 2584 - DNA, 44 bp, synthetic construct
  misc_feature 1..44: note = oligonucleotide decoy
  source 1..44: mol_type = other DNA
cacctgttacatcacgtgtaaataaacatcggtggagccatttt

SEQ ID NO: 2585 - DNA, 44 bp, synthetic construct
  misc_feature 1..44: note = oligonucleotide decoy
  source 1..44: mol_type = other DNA
cacctgttacgtcacgtgtaaacaaacaacggtggagccatttt

SEQ ID NO: 2586 - DNA, 44 bp, synthetic construct
  misc_feature 1..44: note = oligonucleotide decoy
  source 1..44: mol_type = other DNA
cacctgttacgtcacgtgtaaacaaacaccggtggagccatttt

SEQ ID NO: 2587 - DNA, 44 bp, synthetic construct
  misc_feature 1..44: note = oligonucleotide decoy
  source 1..44: mol_type = other DNA
cacctgttacgtcacgtgtaaacaaacagcggtggagccatttt

SEQ ID NO: 2588 - DNA, 44 bp, synthetic construct
  misc_feature 1..44: note = oligonucleotide decoy
  source 1..44: mol_type = other DNA
cacctgttacgtcacgtgtaaacaaacatcggtggagccatttt

SEQ ID NO: 2589 - DNA, 44 bp, synthetic construct
  misc_feature 1..44: note = oligonucleotide decoy
  source 1..44: mol_type = other DNA
cacctgttacgtcacgtgtaaataaacaacggtggagccatttt

SEQ ID NO: 2590 - DNA, 44 bp, synthetic construct
  misc_feature 1..44: note = oligonucleotide decoy
  source 1..44: mol_type = other DNA
cacctgttacgtcacgtgtaaataaacaccggtggagccatttt

SEQ ID NO: 2591 - DNA, 44 bp, synthetic construct
  misc_feature 1..44: note = oligonucleotide decoy
  source 1..44: mol_type = other DNA
cacctgttacgtcacgtgtaaataaacagcggtggagccatttt

SEQ ID NO: 2592 - DNA, 44 bp, synthetic construct
  misc_feature 1..44: note = oligonucleotide decoy
  source 1..44: mol_type = other DNA
cacctgttacgtcacgtgtaaataaacatcggtggagccatttt

SEQ ID NO: 2593 - DNA, 44 bp, synthetic construct
  misc_feature 1..44: note = oligonucleotide decoy
  source 1..44: mol_type = other DNA
cacctgttatatcacgtgtaaacaaacaacggtggagccatttt

SEQ ID NO: 2594 - DNA, 44 bp, synthetic construct
  misc_feature 1..44: note = oligonucleotide decoy
  source 1..44: mol_type = other DNA
cacctgttatatcacgtgtaaacaaacaccggtggagccatttt

SEQ ID NO: 2595 - DNA, 44 bp, synthetic construct
  misc_feature 1..44: note = oligonucleotide decoy
  source 1..44: mol_type = other DNA
cacctgttatatcacgtgtaaacaaacagcggtggagccatttt

SEQ ID NO: 2596 - DNA, 44 bp, synthetic construct
  misc_feature 1..44: note = oligonucleotide decoy
  source 1..44: mol_type = other DNA
cacctgttatatcacgtgtaaacaaacatcggtggagccatttt

SEQ ID NO: 2597 - DNA, 44 bp, synthetic construct
  misc_feature 1..44: note = oligonucleotide decoy
  source 1..44: mol_type = other DNA
cacctgttatatcacgtgtaaataaacaacggtggagccatttt

SEQ ID NO: 2598 - DNA, 44 bp, synthetic construct
  misc_feature 1..44: note = oligonucleotide decoy
  source 1..44: mol_type = other DNA
cacctgttatatcacgtgtaaataaacaccggtggagccatttt

SEQ ID NO: 2599 - DNA, 44 bp, synthetic construct
  misc_feature 1..44: note = oligonucleotide decoy
  source 1..44: mol_type = other DNA
cacctgttatatcacgtgtaaataaacagcggtggagccatttt

SEQ ID NO: 2600 - DNA, 44 bp, synthetic construct
  misc_feature 1..44: note = oligonucleotide decoy
  source 1..44: mol_type = other DNA
cacctgttatatcacgtgtaaataaacatcggtggagccatttt

SEQ ID NO: 2601 - DNA, 44 bp, synthetic construct
  misc_feature 1..44: note = oligonucleotide decoy
  source 1..44: mol_type = other DNA
cacctgttatgtcacgtgtaaacaaacaacggtggagccatttt

SEQ ID NO: 2602 - DNA, 44 bp, synthetic construct
  misc_feature 1..44: note = oligonucleotide decoy
  source 1..44: mol_type = other DNA
cacctgttatgtcacgtgtaaacaaacaccggtggagccatttt

SEQ ID NO: 2603 - DNA, 44 bp, synthetic construct
  misc_feature 1..44: note = oligonucleotide decoy
  source 1..44: mol_type = other DNA
cacctgttatgtcacgtgtaaacaaacagcggtggagccatttt

SEQ ID NO: 2604 - DNA, 44 bp, synthetic construct
  misc_feature 1..44: note = oligonucleotide decoy
  source 1..44: mol_type = other DNA
cacctgttatgtcacgtgtaaacaaacatcggtggagccatttt

SEQ ID NO: 2605 - DNA, 44 bp, synthetic construct
  misc_feature 1..44: note = oligonucleotide decoy
  source 1..44: mol_type = other DNA
cacctgttatgtcacgtgtaaataaacaacggtggagccatttt

SEQ ID NO: 2606 - DNA, 44 bp, synthetic construct
  misc_feature 1..44: note = oligonucleotide decoy
  source 1..44: mol_type = other DNA
cacctgttatgtcacgtgtaaataaacaccggtggagccatttt

SEQ ID NO: 2607 - DNA, 44 bp, synthetic construct
  misc_feature 1..44: note = oligonucleotide decoy
  source 1..44: mol_type = other DNA
cacctgttatgtcacgtgtaaataaacagcggtggagccatttt

SEQ ID NO: 2608 - DNA, 44 bp, synthetic construct
  misc_feature 1..44: note = oligonucleotide decoy
  source 1..44: mol_type = other DNA
cacctgttatgtcacgtgtaaataaacatcggtggagccatttt

SEQ ID NO: 2609 - DNA, 44 bp, synthetic construct
  misc_feature 1..44: note = oligonucleotide decoy
  source 1..44: mol_type = other DNA
caggtgttacatcacgtgtaaacaaacaacgatggagccatctt

SEQ ID NO: 2610 - DNA, 44 bp, synthetic construct
  misc_feature 1..44: note = oligonucleotide decoy
  source 1..44: mol_type = other DNA
caggtgttacatcacgtgtaaacaaacaccgatggagccatctt

SEQ ID NO: 2611 - DNA, 44 bp, synthetic construct
  misc_feature 1..44: note = oligonucleotide decoy
  source 1..44: mol_type = other DNA
caggtgttacatcacgtgtaaacaaacagcgatggagccatctt

SEQ ID NO: 2612 - DNA, 44 bp, synthetic construct
  misc_feature 1..44: note = oligonucleotide decoy
  source 1..44: mol_type = other DNA
caggtgttacatcacgtgtaaacaaacatcgatggagccatctt

SEQ ID NO: 2613 - DNA, 44 bp, synthetic construct
  misc_feature 1..44: note = oligonucleotide decoy
  source 1..44: mol_type = other DNA
caggtgttacatcacgtgtaaataaacaacgatggagccatctt

SEQ ID NO: 2614 - DNA, 44 bp, synthetic construct
  misc_feature 1..44: note = oligonucleotide decoy
  source 1..44: mol_type = other DNA
caggtgttacatcacgtgtaaataaacaccgatggagccatctt

SEQ ID NO: 2615 - DNA, 44 bp, synthetic construct
  misc_feature 1..44: note = oligonucleotide decoy
  source 1..44: mol_type = other DNA
caggtgttacatcacgtgtaaataaacagcgatggagccatctt

SEQ ID NO: 2616 - DNA, 44 bp, synthetic construct
  misc_feature 1..44: note = oligonucleotide decoy
  source 1..44: mol_type = other DNA
caggtgttacatcacgtgtaaataaacatcgatggagccatctt

SEQ ID NO: 2617 - DNA, 44 bp, synthetic construct
  misc_feature 1..44: note = oligonucleotide decoy
  source 1..44: mol_type = other DNA
caggtgttacgtcacgtgtaaacaaacaacgatggagccatctt

SEQ ID NO: 2618 - DNA, 44 bp, synthetic construct
  misc_feature 1..44: note = oligonucleotide decoy
  source 1..44: mol_type = other DNA
caggtgttacgtcacgtgtaaacaaacaccgatggagccatctt

SEQ ID NO: 2619 - DNA, 44 bp, synthetic construct
  misc_feature 1..44: note = oligonucleotide decoy
  source 1..44: mol_type = other DNA
caggtgttacgtcacgtgtaaacaaacagcgatggagccatctt

SEQ ID NO: 2620 - DNA, 44 bp, synthetic construct
  misc_feature 1..44: note = oligonucleotide decoy
  source 1..44: mol_type = other DNA
caggtgttacgtcacgtgtaaacaaacatcgatggagccatctt

SEQ ID NO: 2621 - DNA, 44 bp, synthetic construct
  misc_feature 1..44: note = oligonucleotide decoy
  source 1..44: mol_type = other DNA
caggtgttacgtcacgtgtaaataaacaacgatggagccatctt

SEQ ID NO: 2622 - DNA, 44 bp, synthetic construct
  misc_feature 1..44: note = oligonucleotide decoy
  source 1..44: mol_type = other DNA
caggtgttacgtcacgtgtaaataaacaccgatggagccatctt

SEQ ID NO: 2623 - DNA, 44 bp, synthetic construct
  misc_feature 1..44: note = oligonucleotide decoy
  source 1..44: mol_type = other DNA
caggtgttacgtcacgtgtaaataaacagcgatggagccatctt

SEQ ID NO: 2624 - DNA, 44 bp, synthetic construct
  misc_feature 1..44: note = oligonucleotide decoy
  source 1..44: mol_type = other DNA
caggtgttacgtcacgtgtaaataaacatcgatggagccatctt

SEQ ID NO: 2625 - DNA, 44 bp, synthetic construct
  misc_feature 1..44: note = oligonucleotide decoy
  source 1..44: mol_type = other DNA
caggtgttatatcacgtgtaaacaaacaacgatggagccatctt

SEQ ID NO: 2626 - DNA, 44 bp, synthetic construct
  misc_feature 1..44: note = oligonucleotide decoy
  source 1..44: mol_type = other DNA
caggtgttatatcacgtgtaaacaaacaccgatggagccatctt

SEQ ID NO: 2627 - DNA, 44 bp, synthetic construct
  misc_feature 1..44: note = oligonucleotide decoy
  source 1..44: mol_type = other DNA
caggtgttatatcacgtgtaaacaaacagcgatggagccatctt

SEQ ID NO: 2628 - DNA, 44 bp, synthetic construct
  misc_feature 1..44: note = oligonucleotide decoy
  source 1..44: mol_type = other DNA
caggtgttatatcacgtgtaaacaaacatcgatggagccatctt

SEQ ID NO: 2629 - DNA, 44 bp, synthetic construct
  misc_feature 1..44: note = oligonucleotide decoy
  source 1..44: mol_type = other DNA
caggtgttatatcacgtgtaaataaacaacgatggagccatctt

SEQ ID NO: 2630 - DNA, 44 bp, synthetic construct
  misc_feature 1..44: note = oligonucleotide decoy
  source 1..44: mol_type = other DNA
caggtgttatatcacgtgtaaataaacaccgatggagccatctt

SEQ ID NO: 2631 - DNA, 44 bp, synthetic construct
  misc_feature 1..44: note = oligonucleotide decoy
  source 1..44: mol_type = other DNA
caggtgttatatcacgtgtaaataaacagcgatggagccatctt

SEQ ID NO: 2632 - DNA, 44 bp, synthetic construct
  misc_feature 1..44: note = oligonucleotide decoy
  source 1..44: mol_type = other DNA
caggtgttatatcacgtgtaaataaacatcgatggagccatctt

SEQ ID NO: 2633 - DNA, 44 bp, synthetic construct
  misc_feature 1..44: note = oligonucleotide decoy
  source 1..44: mol_type = other DNA
caggtgttatgtcacgtgtaaacaaacaacgatggagccatctt

SEQ ID NO: 2634 - DNA, 44 bp, synthetic construct
  misc_feature 1..44: note = oligonucleotide decoy
  source 1..44: mol_type = other DNA
caggtgttatgtcacgtgtaaacaaacaccgatggagccatctt

SEQ ID NO: 2635 - DNA, 44 bp, synthetic construct
  misc_feature 1..44: note = oligonucleotide decoy
  source 1..44: mol_type = other DNA
caggtgttatgtcacgtgtaaacaaacagcgatggagccatctt

SEQ ID NO: 2636 - DNA, 44 bp, synthetic construct
  misc_feature 1..44: note = oligonucleotide decoy
  source 1..44: mol_type = other DNA
caggtgttatgtcacgtgtaaacaaacatcgatggagccatctt

SEQ ID NO: 2637 - DNA, 44 bp, synthetic construct
  misc_feature 1..44: note = oligonucleotide decoy
  source 1..44: mol_type = other DNA
caggtgttatgtcacgtgtaaataaacaacgatggagccatctt

SEQ ID NO: 2638 - DNA, 44 bp, synthetic construct
  misc_feature 1..44: note = oligonucleotide decoy
  source 1..44: mol_type = other DNA
caggtgttatgtcacgtgtaaataaacaccgatggagccatctt

SEQ ID NO: 2639 - DNA, 44 bp, synthetic construct
  misc_feature 1..44: note = oligonucleotide decoy
  source 1..44: mol_type = other DNA
caggtgttatgtcacgtgtaaataaacagcgatggagccatctt

SEQ ID NO: 2640 - DNA, 44 bp, synthetic construct
  misc_feature 1..44: note = oligonucleotide decoy
  source 1..44: mol_type = other DNA
caggtgttatgtcacgtgtaaataaacatcgatggagccatctt

SEQ ID NO: 2641 - DNA, 44 bp, synthetic construct
  misc_feature 1..44: note = oligonucleotide decoy
  source 1..44: mol_type = other DNA
caggtgttacatcacgtgtaaacaaacaacgatggagccatttt

SEQ ID NO: 2642 - DNA, 44 bp, synthetic construct
  misc_feature 1..44: note = oligonucleotide decoy
  source 1..44: mol_type = other DNA
caggtgttacatcacgtgtaaacaaacaccgatggagccatttt

SEQ ID NO: 2643 - DNA, 44 bp, synthetic construct
  misc_feature 1..44: note = oligonucleotide decoy
  source 1..44: mol_type = other DNA
caggtgttacatcacgtgtaaacaaacagcgatggagccatttt

SEQ ID NO: 2644 - DNA, 44 bp, synthetic construct
  misc_feature 1..44: note = oligonucleotide decoy
  source 1..44: mol_type = other DNA
caggtgttacatcacgtgtaaacaaacatcgatggagccatttt

SEQ ID NO: 2645 - DNA, 44 bp, synthetic construct
  misc_feature 1..44: note = oligonucleotide decoy
  source 1..44: mol_type = other DNA
caggtgttacatcacgtgtaaataaacaacgatggagccatttt

SEQ ID NO: 2646 - DNA, 44 bp, synthetic construct
  misc_feature 1..44: note = oligonucleotide decoy
  source 1..44: mol_type = other DNA
caggtgttacatcacgtgtaaataaacaccgatggagccatttt

SEQ ID NO: 2647 - DNA, 44 bp, synthetic construct
  misc_feature 1..44: note = oligonucleotide decoy
  source 1..44: mol_type = other DNA
caggtgttacatcacgtgtaaataaacagcgatggagccatttt

SEQ ID NO: 2648 - DNA, 44 bp, synthetic construct
  misc_feature 1..44: note = oligonucleotide decoy
  source 1..44: mol_type = other DNA
caggtgttacatcacgtgtaaataaacatcgatggagccatttt

SEQ ID NO: 2649 - DNA, 44 bp, synthetic construct
  misc_feature 1..44: note = oligonucleotide decoy
  source 1..44: mol_type = other DNA
caggtgttacgtcacgtgtaaacaaacaacgatggagccatttt

SEQ ID NO: 2650 - DNA, 44 bp, synthetic construct
  misc_feature 1..44: note = oligonucleotide decoy
  source 1..44: mol_type = other DNA
caggtgttacgtcacgtgtaaacaaacaccgatggagccatttt

SEQ ID NO: 2651 - DNA, 44 bp, synthetic construct
  misc_feature 1..44: note = oligonucleotide decoy
  source 1..44: mol_type = other DNA
caggtgttacgtcacgtgtaaacaaacagcgatggagccatttt

SEQ ID NO: 2652 - DNA, 44 bp, synthetic construct
  misc_feature 1..44: note = oligonucleotide decoy
  source 1..44: mol_type = other DNA
caggtgttacgtcacgtgtaaacaaacatcgatggagccatttt

SEQ ID NO: 2653 - DNA, 44 bp, synthetic construct
  misc_feature 1..44: note = oligonucleotide decoy
  source 1..44: mol_type = other DNA
caggtgttacgtcacgtgtaaataaacaacgatggagccatttt

SEQ ID NO: 2654 - DNA, 44 bp, synthetic construct
  misc_feature 1..44: note = oligonucleotide decoy
  source 1..44: mol_type = other DNA
caggtgttacgtcacgtgtaaataaacaccgatggagccatttt

SEQ ID NO: 2655 - DNA, 44 bp, synthetic construct
  misc_feature 1..44: note = oligonucleotide decoy
  source 1..44: mol_type = other DNA
caggtgttacgtcacgtgtaaataaacagcgatggagccatttt

SEQ ID NO: 2656 - DNA, 44 bp, synthetic construct
  misc_feature 1..44: note = oligonucleotide decoy
  source 1..44: mol_type = other DNA
caggtgttacgtcacgtgtaaataaacatcgatggagccatttt

SEQ ID NO: 2657 - DNA, 44 bp, synthetic construct
  misc_feature 1..44: note = oligonucleotide decoy
  source 1..44: mol_type = other DNA
caggtgttatatcacgtgtaaacaaacaacgatggagccatttt

SEQ ID NO: 2658 - DNA, 44 bp, synthetic construct
  misc_feature 1..44: note = oligonucleotide decoy
  source 1..44: mol_type = other DNA
caggtgttatatcacgtgtaaacaaacaccgatggagccatttt

SEQ ID NO: 2659 - DNA, 44 bp, synthetic construct
  misc_feature 1..44: note = oligonucleotide decoy
  source 1..44: mol_type = other DNA
caggtgttatatcacgtgtaaacaaacagcgatggagccatttt

SEQ ID NO: 2660 - DNA, 44 bp, synthetic construct
  misc_feature 1..44: note = oligonucleotide decoy
  source 1..44: mol_type = other DNA
caggtgttatatcacgtgtaaacaaacatcgatggagccatttt

SEQ ID NO: 2661 - DNA, 44 bp, synthetic construct
  misc_feature 1..44: note = oligonucleotide decoy
  source 1..44: mol_type = other DNA
caggtgttatatcacgtgtaaataaacaacgatggagccatttt

SEQ ID NO: 2662 - DNA, 44 bp, synthetic construct
  misc_feature 1..44: note = oligonucleotide decoy
  source 1..44: mol_type = other DNA
caggtgttatatcacgtgtaaataaacaccgatggagccatttt

SEQ ID NO: 2663 - DNA, 44 bp, synthetic construct
  misc_feature 1..44: note = oligonucleotide decoy
  source 1..44: mol_type = other DNA
caggtgttatatcacgtgtaaataaacagcgatggagccatttt

SEQ ID NO: 2664 - DNA, 44 bp, synthetic construct
  misc_feature 1..44: note = oligonucleotide decoy
  source 1..44: mol_type = other DNA
caggtgttatatcacgtgtaaataaacatcgatggagccatttt

SEQ ID NO: 2665 - DNA, 44 bp, synthetic construct
  misc_feature 1..44: note = oligonucleotide decoy
  source 1..44: mol_type = other DNA
caggtgttatgtcacgtgtaaacaaacaacgatggagccatttt

SEQ ID NO: 2666 - DNA, 44 bp, synthetic construct
  misc_feature 1..44: note = oligonucleotide decoy
  source 1..44: mol_type = other DNA
caggtgttatgtcacgtgtaaacaaacaccgatggagccatttt

SEQ ID NO: 2667 - DNA, 44 bp, synthetic construct
  misc_feature 1..44: note = oligonucleotide decoy
  source 1..44: mol_type = other DNA
caggtgttatgtcacgtgtaaacaaacagcgatggagccatttt

SEQ ID NO: 2668 - DNA, 44 bp, synthetic construct
  misc_feature 1..44: note = oligonucleotide decoy
  source 1..44: mol_type = other DNA
caggtgttatgtcacgtgtaaacaaacatcgatggagccatttt

SEQ ID NO: 2669 - DNA, 44 bp, synthetic construct
  misc_feature 1..44: note = oligonucleotide decoy
  source 1..44: mol_type = other DNA
caggtgttatgtcacgtgtaaataaacaacgatggagccatttt

SEQ ID NO: 2670 - DNA, 44 bp, synthetic construct
  misc_feature 1..44: note = oligonucleotide decoy
  source 1..44: mol_type = other DNA
caggtgttatgtcacgtgtaaataaacaccgatggagccatttt

SEQ ID NO: 2671 - DNA, 44 bp, synthetic construct
  misc_feature 1..44: note = oligonucleotide decoy
  source 1..44: mol_type = other DNA
caggtgttatgtcacgtgtaaataaacagcgatggagccatttt

SEQ ID NO: 2672 - DNA, 44 bp, synthetic construct
  misc_feature 1..44: note = oligonucleotide decoy
  source 1..44: mol_type = other DNA
caggtgttatgtcacgtgtaaataaacatcgatggagccatttt

SEQ ID NO: 2673 - DNA, 44 bp, synthetic construct
  misc_feature 1..44: note = oligonucleotide decoy
  source 1..44: mol_type = other DNA
caggtgttacatcacgtgtaaacaaacaacggtggagccatctt

SEQ ID NO: 2674 - DNA, 44 bp, synthetic construct
  misc_feature 1..44: note = oligonucleotide decoy
  source 1..44: mol_type = other DNA
caggtgttacatcacgtgtaaacaaacaccggtggagccatctt

SEQ ID NO: 2675 - DNA, 44 bp, synthetic construct
  misc_feature 1..44: note = oligonucleotide decoy
  source 1..44: mol_type = other DNA
caggtgttacatcacgtgtaaacaaacagcggtggagccatctt

SEQ ID NO: 2676 - DNA, 44 bp, synthetic construct
  misc_feature 1..44: note = oligonucleotide decoy
  source 1..44: mol_type = other DNA
caggtgttacatcacgtgtaaacaaacatcggtggagccatctt

SEQ ID NO: 2677 - DNA, 44 bp, synthetic construct
  misc_feature 1..44: note = oligonucleotide decoy
  source 1..44: mol_type = other DNA
caggtgttacatcacgtgtaaataaacaacggtggagccatctt

SEQ ID NO: 2678 - DNA, 44 bp, synthetic construct
  misc_feature 1..44: note = oligonucleotide decoy
  source 1..44: mol_type = other DNA
caggtgttacatcacgtgtaaataaacaccggtggagccatctt

SEQ ID NO: 2679 - DNA, 44 bp, synthetic construct
  misc_feature 1..44: note = oligonucleotide decoy
  source 1..44: mol_type = other DNA
caggtgttacatcacgtgtaaataaacagcggtggagccatctt

SEQ ID NO: 2680 - DNA, 44 bp, synthetic construct
  misc_feature 1..44: note = oligonucleotide decoy
  source 1..44: mol_type = other DNA
caggtgttacatcacgtgtaaataaacatcggtggagccatctt

SEQ ID NO: 2681 - DNA, 44 bp, synthetic construct
  misc_feature 1..44: note = oligonucleotide decoy
  source 1..44: mol_type = other DNA
caggtgttacgtcacgtgtaaacaaacaacggtggagccatctt

SEQ ID NO: 2682 - DNA, 44 bp, synthetic construct
  misc_feature 1..44: note = oligonucleotide decoy
  source 1..44: mol_type = other DNA
caggtgttacgtcacgtgtaaacaaacaccggtggagccatctt

SEQ ID NO: 2683 - DNA, 44 bp, synthetic construct
  misc_feature 1..44: note = oligonucleotide decoy
  source 1..44: mol_type = other DNA
caggtgttacgtcacgtgtaaacaaacagcggtggagccatctt

SEQ ID NO: 2684 - DNA, 44 bp, synthetic construct
  misc_feature 1..44: note = oligonucleotide decoy
  source 1..44: mol_type = other DNA
caggtgttacgtcacgtgtaaacaaacatcggtggagccatctt

SEQ ID NO: 2685 - DNA, 44 bp, synthetic construct
  misc_feature 1..44: note = oligonucleotide decoy
  source 1..44: mol_type = other DNA
caggtgttacgtcacgtgtaaataaacaacggtggagccatctt

SEQ ID NO: 2686 - DNA, 44 bp, synthetic construct
  misc_feature 1..44: note = oligonucleotide decoy
  source 1..44: mol_type = other DNA
caggtgttacgtcacgtgtaaataaacaccggtggagccatctt

SEQ ID NO: 2687 - DNA, 44 bp, synthetic construct
  misc_feature 1..44: note = oligonucleotide decoy
  source 1..44: mol_type = other DNA
caggtgttacgtcacgtgtaaataaacagcggtggagccatctt

SEQ ID NO: 2688 - DNA, 44 bp, synthetic construct
  misc_feature 1..44: note = oligonucleotide decoy
  source 1..44: mol_type = other DNA
caggtgttacgtcacgtgtaaataaacatcggtggagccatctt

SEQ ID NO: 2689 - DNA, 44 bp, synthetic construct
  misc_feature 1..44: note = oligonucleotide decoy
  source 1..44: mol_type = other DNA
caggtgttatatcacgtgtaaacaaacaacggtggagccatctt

SEQ ID NO: 2690 - DNA, 44 bp, synthetic construct
  misc_feature 1..44: note = oligonucleotide decoy
  source 1..44: mol_type = other DNA
caggtgttatatcacgtgtaaacaaacaccggtggagccatctt

SEQ ID NO: 2691 - DNA, 44 bp, synthetic construct
  misc_feature 1..44: note = oligonucleotide decoy
  source 1..44: mol_type = other DNA
caggtgttatatcacgtgtaaacaaacagcggtggagccatctt

SEQ ID NO: 2692 - DNA, 44 bp, synthetic construct
  misc_feature 1..44: note = oligonucleotide decoy
  source 1..44: mol_type = other DNA
caggtgttatatcacgtgtaaacaaacatcggtggagccatctt

SEQ ID NO: 2693 - DNA, 44 bp, synthetic construct
  misc_feature 1..44: note = oligonucleotide decoy
  source 1..44: mol_type = other DNA
caggtgttatatcacgtgtaaataaacaacggtggagccatctt

SEQ ID NO: 2694 - DNA, 44 bp, synthetic construct
  misc_feature 1..44: note = oligonucleotide decoy
  source 1..44: mol_type = other DNA
caggtgttatatcacgtgtaaataaacaccggtggagccatctt

SEQ ID NO: 2695 - DNA, 44 bp, synthetic construct
  misc_feature 1..44: note = oligonucleotide decoy
  source 1..44: mol_type = other DNA
caggtgttatatcacgtgtaaataaacagcggtggagccatctt

SEQ ID NO: 2696 - DNA, 44 bp, synthetic construct
  misc_feature 1..44: note = oligonucleotide decoy
  source 1..44: mol_type = other DNA
caggtgttatatcacgtgtaaataaacatcggtggagccatctt

SEQ ID NO: 2697 - DNA, 44 bp, synthetic construct
  misc_feature 1..44: note = oligonucleotide decoy
  source 1..44: mol_type = other DNA
caggtgttatgtcacgtgtaaacaaacaacggtggagccatctt

SEQ ID NO: 2698 - DNA, 44 bp, synthetic construct
  misc_feature 1..44: note = oligonucleotide decoy
  source 1..44: mol_type = other DNA
caggtgttatgtcacgtgtaaacaaacaccggtggagccatctt

SEQ ID NO: 2699 - DNA, 44 bp, synthetic construct
  misc_feature 1..44: note = oligonucleotide decoy
  source 1..44: mol_type = other DNA
caggtgttatgtcacgtgtaaacaaacagcggtggagccatctt

SEQ ID NO: 2700 - DNA, 44 bp, synthetic construct
  misc_feature 1..44: note = oligonucleotide decoy
  source 1..44: mol_type = other DNA
caggtgttatgtcacgtgtaaacaaacatcggtggagccatctt

SEQ ID NO: 2701 - DNA, 44 bp, synthetic construct
  misc_feature 1..44: note = oligonucleotide decoy
  source 1..44: mol_type = other DNA
caggtgttatgtcacgtgtaaataaacaacggtggagccatctt

SEQ ID NO: 2702 - DNA, 44 bp, synthetic construct
  misc_feature 1..44: note = oligonucleotide decoy
  source 1..44: mol_type = other DNA
caggtgttatgtcacgtgtaaataaacaccggtggagccatctt

SEQ ID NO: 2703 - DNA, 44 bp, synthetic construct
  misc_feature 1..44: note = oligonucleotide decoy
  source 1..44: mol_type = other DNA
caggtgttatgtcacgtgtaaataaacagcggtggagccatctt

SEQ ID NO: 2704 - DNA, 44 bp, synthetic construct
  misc_feature 1..44: note = oligonucleotide decoy
  source 1..44: mol_type = other DNA
caggtgttatgtcacgtgtaaataaacatcggtggagccatctt

SEQ ID NO: 2705 - DNA, 44 bp, synthetic construct
  misc_feature 1..44: note = oligonucleotide decoy
  source 1..44: mol_type = other DNA
caggtgttacatcacgtgtaaacaaacaacggtggagccatttt

SEQ ID NO: 2706 - DNA, 44 bp, synthetic construct
  misc_feature 1..44: note = oligonucleotide decoy
  source 1..44: mol_type = other DNA
caggtgttacatcacgtgtaaacaaacaccggtggagccatttt

SEQ ID NO: 2707 - DNA, 44 bp, synthetic construct
  misc_feature 1..44: note = oligonucleotide decoy
  source 1..44: mol_type = other DNA
caggtgttacatcacgtgtaaacaaacagcggtggagccatttt

SEQ ID NO: 2708 - DNA, 44 bp, synthetic construct
  misc_feature 1..44: note = oligonucleotide decoy
  source 1..44: mol_type = other DNA
caggtgttacatcacgtgtaaacaaacatcggtggagccatttt

SEQ ID NO: 2709 - DNA, 44 bp, synthetic construct
  misc_feature 1..44: note = oligonucleotide decoy
  source 1..44: mol_type = other DNA
caggtgttacatcacgtgtaaataaacaacggtggagccatttt

SEQ ID NO: 2710 - DNA, 44 bp, synthetic construct
  misc_feature 1..44: note = oligonucleotide decoy
  source 1..44: mol_type = other DNA
caggtgttacatcacgtgtaaataaacaccggtggagccatttt

SEQ ID NO: 2711 - DNA, 44 bp, synthetic construct
  misc_feature 1..44: note = oligonucleotide decoy
  source 1..44: mol_type = other DNA
caggtgttacatcacgtgtaaataaacagcggtggagccatttt

SEQ ID NO: 2712 - DNA, 44 bp, synthetic construct
  misc_feature 1..44: note = oligonucleotide decoy
  source 1..44: mol_type = other DNA
caggtgttacatcacgtgtaaataaacatcggtggagccatttt

SEQ ID NO: 2713 - DNA, 44 bp, synthetic construct
  misc_feature 1..44: note = oligonucleotide decoy
  source 1..44: mol_type = other DNA
caggtgttacgtcacgtgtaaacaaacaacggtggagccatttt

SEQ ID NO: 2714 - DNA, 44 bp, synthetic construct
  misc_feature 1..44: note = oligonucleotide decoy
  source 1..44: mol_type = other DNA
caggtgttacgtcacgtgtaaacaaacaccggtggagccatttt

SEQ ID NO: 2715 - DNA, 44 bp, synthetic construct
  misc_feature 1..44: note = oligonucleotide decoy
  source 1..44: mol_type = other DNA
caggtgttacgtcacgtgtaaacaaacagcggtggagccatttt

SEQ ID NO: 2716 - DNA, 44 bp, synthetic construct
  misc_feature 1..44: note = oligonucleotide decoy
  source 1..44: mol_type = other DNA
caggtgttacgtcacgtgtaaacaaacatcggtggagccatttt

SEQ ID NO: 2717 - DNA, 44 bp, synthetic construct
  misc_feature 1..44: note = oligonucleotide decoy
  source 1..44: mol_type = other DNA
caggtgttacgtcacgtgtaaataaacaacggtggagccatttt

SEQ ID NO: 2718 - DNA, 44 bp, synthetic construct
  misc_feature 1..44: note = oligonucleotide decoy
  source 1..44: mol_type = other DNA
caggtgttacgtcacgtgtaaataaacaccggtggagccatttt

SEQ ID NO: 2719 - DNA, 44 bp, synthetic construct
  misc_feature 1..44: note = oligonucleotide decoy
  source 1..44: mol_type = other DNA
caggtgttacgtcacgtgtaaataaacagcggtggagccatttt

SEQ ID NO: 2720 - DNA, 44 bp, synthetic construct
  misc_feature 1..44: note = oligonucleotide decoy
  source 1..44: mol_type = other DNA
caggtgttacgtcacgtgtaaataaacatcggtggagccatttt

SEQ ID NO: 2721 - DNA, 44 bp, synthetic construct
  misc_feature 1..44: note = oligonucleotide decoy
  source 1..44: mol_type = other DNA
caggtgttatatcacgtgtaaacaaacaacggtggagccatttt

SEQ ID NO: 2722 - DNA, 44 bp, synthetic construct
  misc_feature 1..44: note = oligonucleotide decoy
  source 1..44: mol_type = other DNA
caggtgttatatcacgtgtaaacaaacaccggtggagccatttt

SEQ ID NO: 2723 - DNA, 44 bp, synthetic construct
  misc_feature 1..44: note = oligonucleotide decoy
  source 1..44: mol_type = other DNA
caggtgttatatcacgtgtaaacaaacagcggtggagccatttt

SEQ ID NO: 2724 - DNA, 44 bp, synthetic construct
  misc_feature 1..44: note = oligonucleotide decoy
  source 1..44: mol_type = other DNA
caggtgttatatcacgtgtaaacaaacatcggtggagccatttt

SEQ ID NO: 2725 - DNA, 44 bp, synthetic construct
  misc_feature 1..44: note = oligonucleotide decoy
  source 1..44: mol_type = other DNA
caggtgttatatcacgtgtaaataaacaacggtggagccatttt

SEQ ID NO: 2726 - DNA, 44 bp, synthetic construct
  misc_feature 1..44: note = oligonucleotide decoy
  source 1..44: mol_type = other DNA
caggtgttatatcacgtgtaaataaacaccggtggagccatttt

SEQ ID NO: 2727 - DNA, 44 bp, synthetic construct
  misc_feature 1..44: note = oligonucleotide decoy
  source 1..44: mol_type = other DNA
caggtgttatatcacgtgtaaataaacagcggtggagccatttt

SEQ ID NO: 2728 - DNA, 44 bp, synthetic construct
  misc_feature 1..44: note = oligonucleotide decoy
  source 1..44: mol_type = other DNA
caggtgttatatcacgtgtaaataaacatcggtggagccatttt

SEQ ID NO: 2729 - DNA, 44 bp, synthetic construct
  misc_feature 1..44: note = oligonucleotide decoy
  source 1..44: mol_type = other DNA
caggtgttatgtcacgtgtaaacaaacaacggtggagccatttt

SEQ ID NO: 2730 - DNA, 44 bp, synthetic construct
  misc_feature 1..44: note = oligonucleotide decoy
  source 1..44: mol_type = other DNA
caggtgttatgtcacgtgtaaacaaacaccggtggagccatttt

SEQ ID NO: 2731 - DNA, 44 bp, synthetic construct
  misc_feature 1..44: note = oligonucleotide decoy
  source 1..44: mol_type = other DNA
caggtgttatgtcacgtgtaaacaaacagcggtggagccatttt

SEQ ID NO: 2732 - DNA, 44 bp, synthetic construct
  misc_feature 1..44: note = oligonucleotide decoy
  source 1..44: mol_type = other DNA
caggtgttatgtcacgtgtaaacaaacatcggtggagccatttt

SEQ ID NO: 2733 - DNA, 44 bp, synthetic construct
  misc_feature 1..44: note = oligonucleotide decoy
  source 1..44: mol_type = other DNA
caggtgttatgtcacgtgtaaataaacaacggtggagccatttt

SEQ ID NO: 2734 - DNA, 44 bp, synthetic construct
  misc_feature 1..44: note = oligonucleotide decoy
  source 1..44: mol_type = other DNA
caggtgttatgtcacgtgtaaataaacaccggtggagccatttt

SEQ ID NO: 2735 - DNA, 44 bp, synthetic construct
  misc_feature 1..44: note = oligonucleotide decoy
  source 1..44: mol_type = other DNA
caggtgttatgtcacgtgtaaataaacagcggtggagccatttt

SEQ ID NO: 2736 - DNA, 44 bp, synthetic construct
  misc_feature 1..44: note = oligonucleotide decoy
  source 1..44: mol_type = other DNA
caggtgttatgtcacgtgtaaataaacatcggtggagccatttt

SEQ ID NO: 2737 - DNA, 44 bp, synthetic construct
  misc_feature 1..44: note = oligonucleotide decoy
  source 1..44: mol_type = other DNA
cacgtgtaaacaaacaggtgacataacaacgatggagccatctt

SEQ ID NO: 2738 - DNA, 44 bp, synthetic construct
  misc_feature 1..44: note = oligonucleotide decoy
  source 1..44: mol_type = other DNA
cacgtgtaaacaaacaggtgacataacaccgatggagccatctt

SEQ ID NO: 2739 - DNA, 44 bp, synthetic construct
  misc_feature 1..44: note = oligonucleotide decoy
  source 1..44: mol_type = other DNA
cacgtgtaaacaaacaggtgacataacagcgatggagccatctt

SEQ ID NO: 2740 - DNA, 44 bp, synthetic construct
  misc_feature 1..44: note = oligonucleotide decoy
  source 1..44: mol_type = other DNA
cacgtgtaaacaaacaggtgacataacatcgatggagccatctt

SEQ ID NO: 2741 - DNA, 44 bp, synthetic construct
  misc_feature 1..44: note = oligonucleotide decoy
  source 1..44: mol_type = other DNA
cacgtgtaaacaaacaggtgacgtaacaacgatggagccatctt

SEQ ID NO: 2742 - DNA, 44 bp, synthetic construct
  misc_feature 1..44: note = oligonucleotide decoy
  source 1..44: mol_type = other DNA
cacgtgtaaacaaacaggtgacgtaacaccgatggagccatctt

SEQ ID NO: 2743 - DNA, 44 bp, synthetic construct
  misc_feature 1..44: note = oligonucleotide decoy
  source 1..44: mol_type = other DNA
cacgtgtaaacaaacaggtgacgtaacagcgatggagccatctt

SEQ ID NO: 2744 - DNA, 44 bp, synthetic construct
  misc_feature 1..44: note = oligonucleotide decoy
  source 1..44: mol_type = other DNA
cacgtgtaaacaaacaggtgacgtaacatcgatggagccatctt

SEQ ID NO: 2745 - DNA, 44 bp, synthetic construct
  misc_feature 1..44: note = oligonucleotide decoy
  source 1..44: mol_type = other DNA
cacgtgtaaacaaacaggtgatataacaacgatggagccatctt

SEQ ID NO: 2746 - DNA, 44 bp, synthetic construct
  misc_feature 1..44: note = oligonucleotide decoy
  source 1..44: mol_type = other DNA
cacgtgtaaacaaacaggtgatataacaccgatggagccatctt

SEQ ID NO: 2747 - DNA, 44 bp, synthetic construct
  misc_feature 1..44: note = oligonucleotide decoy
  source 1..44: mol_type = other DNA
cacgtgtaaacaaacaggtgatataacagcgatggagccatctt

SEQ ID NO: 2748 - DNA, 44 bp, synthetic construct
  misc_feature 1..44: note = oligonucleotide decoy
  source 1..44: mol_type = other DNA
cacgtgtaaacaaacaggtgatataacatcgatggagccatctt

SEQ ID NO: 2749 - DNA, 44 bp, synthetic construct
  misc_feature 1..44: note = oligonucleotide decoy
  source 1..44: mol_type = other DNA
cacgtgtaaacaaacaggtgatgtaacaacgatggagccatctt

SEQ ID NO: 2750 - DNA, 44 bp, synthetic construct
  misc_feature 1..44: note = oligonucleotide decoy
  source 1..44: mol_type = other DNA
cacgtgtaaacaaacaggtgatgtaacaccgatggagccatctt

SEQ ID NO: 2751 - DNA, 44 bp, synthetic construct
  misc_feature 1..44: note = oligonucleotide decoy
  source 1..44: mol_type = other DNA
cacgtgtaaacaaacaggtgatgtaacagcgatggagccatctt

SEQ ID NO: 2752 - DNA, 44 bp, synthetic construct
  misc_feature 1..44: note = oligonucleotide decoy
  source 1..44: mol_type = other DNA
cacgtgtaaacaaacaggtgatgtaacatcgatggagccatctt

SEQ ID NO: 2753 - DNA, 44 bp, synthetic construct
  misc_feature 1..44: note = oligonucleotide decoy
  source 1..44: mol_type = other DNA
cacgtgtaaataaacaggtgacataacaacgatggagccatctt

SEQ ID NO: 2754 - DNA, 44 bp, synthetic construct
  misc_feature 1..44: note = oligonucleotide decoy
  source 1..44: mol_type = other DNA
cacgtgtaaataaacaggtgacataacaccgatggagccatctt

SEQ ID NO: 2755 - DNA, 44 bp, synthetic construct
  misc_feature 1..44: note = oligonucleotide decoy
  source 1..44: mol_type = other DNA
cacgtgtaaataaacaggtgacataacagcgatggagccatctt

SEQ ID NO: 2756 - DNA, 44 bp, synthetic construct
  misc_feature 1..44: note = oligonucleotide decoy
  source 1..44: mol_type = other DNA
cacgtgtaaataaacaggtgacataacatcgatggagccatctt

SEQ ID NO: 2757 - DNA, 44 bp, synthetic construct
  misc_feature 1..44: note = oligonucleotide decoy
  source 1..44: mol_type = other DNA
cacgtgtaaataaacaggtgacgtaacaacgatggagccatctt

SEQ ID NO: 2758 - DNA, 44 bp, synthetic construct
  misc_feature 1..44: note = oligonucleotide decoy
  source 1..44: mol_type = other DNA
cacgtgtaaataaacaggtgacgtaacaccgatggagccatctt

SEQ ID NO: 2759 - DNA, 44 bp, synthetic construct
  misc_feature 1..44: note = oligonucleotide decoy
  source 1..44: mol_type = other DNA
cacgtgtaaataaacaggtgacgtaacagcgatggagccatctt

SEQ ID NO: 2760 - DNA, 44 bp, synthetic construct
  misc_feature 1..44: note = oligonucleotide decoy
  source 1..44: mol_type = other DNA
cacgtgtaaataaacaggtgacgtaacatcgatggagccatctt

SEQ ID NO: 2761 - DNA, 44 bp, synthetic construct
  misc_feature 1..44: note = oligonucleotide decoy
  source 1..44: mol_type = other DNA
cacgtgtaaataaacaggtgatataacaacgatggagccatctt

SEQ ID NO: 2762 - DNA, 44 bp, synthetic construct
  misc_feature 1..44: note = oligonucleotide decoy
  source 1..44: mol_type = other DNA
cacgtgtaaataaacaggtgatataacaccgatggagccatctt

SEQ ID NO: 2763 - DNA, 44 bp, synthetic construct
  misc_feature 1..44: note = oligonucleotide decoy
  source 1..44: mol_type = other DNA
cacgtgtaaataaacaggtgatataacagcgatggagccatctt

SEQ ID NO: 2764 - DNA, 44 bp, synthetic construct
  misc_feature 1..44: note = oligonucleotide decoy
  source 1..44: mol_type = other DNA
cacgtgtaaataaacaggtgatataacatcgatggagccatctt

SEQ ID NO: 2765 - DNA, 44 bp, synthetic construct
  misc_feature 1..44: note = oligonucleotide decoy
  source 1..44: mol_type = other DNA
cacgtgtaaataaacaggtgatgtaacaacgatggagccatctt

SEQ ID NO: 2766 - DNA, 44 bp, synthetic construct
  misc_feature 1..44: note = oligonucleotide decoy
  source 1..44: mol_type = other DNA
cacgtgtaaataaacaggtgatgtaacaccgatggagccatctt

SEQ ID NO: 2767 - DNA, 44 bp, synthetic construct
  misc_feature 1..44: note = oligonucleotide decoy
  source 1..44: mol_type = other DNA
cacgtgtaaataaacaggtgatgtaacagcgatggagccatctt

SEQ ID NO: 2768 - DNA, 44 bp, synthetic construct
  misc_feature 1..44: note = oligonucleotide decoy
  source 1..44: mol_type = other DNA
cacgtgtaaataaacaggtgatgtaacatcgatggagccatctt

SEQ ID NO: 2769 - DNA, 44 bp, synthetic construct
  misc_feature 1..44: note = oligonucleotide decoy
  source 1..44: mol_type = other DNA
cacgtgtaaacaaacaggtgacataacaacgatggagccatttt

SEQ ID NO: 2770 - DNA, 44 bp, synthetic construct
  misc_feature 1..44: note = oligonucleotide decoy
  source 1..44: mol_type = other DNA
cacgtgtaaacaaacaggtgacataacaccgatggagccatttt

SEQ ID NO: 2771 - DNA, 44 bp, synthetic construct
  misc_feature 1..44: note = oligonucleotide decoy
  source 1..44: mol_type = other DNA
cacgtgtaaacaaacaggtgacataacagcgatggagccatttt

SEQ ID NO: 2772 - DNA, 44 bp, synthetic construct
  misc_feature 1..44: note = oligonucleotide decoy
  source 1..44: mol_type = other DNA
cacgtgtaaacaaacaggtgacataacatcgatggagccatttt

SEQ ID NO: 2773 - DNA, 44 bp, synthetic construct
  misc_feature 1..44: note = oligonucleotide decoy
  source 1..44: mol_type = other DNA
cacgtgtaaacaaacaggtgacgtaacaacgatggagccatttt

SEQ ID NO: 2774 - DNA, 44 bp, synthetic construct
  misc_feature 1..44: note = oligonucleotide decoy
  source 1..44: mol_type = other DNA
cacgtgtaaacaaacaggtgacgtaacaccgatggagccatttt

SEQ ID NO: 2775 - DNA, 44 bp, synthetic construct
  misc_feature 1..44: note = oligonucleotide decoy
  source 1..44: mol_type = other DNA
cacgtgtaaacaaacaggtgacgtaacagcgatggagccatttt

SEQ ID NO: 2776 - DNA, 44 bp, synthetic construct
  misc_feature 1..44: note = oligonucleotide decoy
  source 1..44: mol_type = other DNA
cacgtgtaaacaaacaggtgacgtaacatcgatggagccatttt

SEQ ID NO: 2777 - DNA, 44 bp, synthetic construct
  misc_feature 1..44: note = oligonucleotide decoy
  source 1..44: mol_type = other DNA
cacgtgtaaacaaacaggtgatataacaacgatggagccatttt

SEQ ID NO: 2778 - DNA, 44 bp, synthetic construct
  misc_feature 1..44: note = oligonucleotide decoy
  source 1..44: mol_type = other DNA
cacgtgtaaacaaacaggtgatataacaccgatggagccatttt

SEQ ID NO: 2779 - DNA, 44 bp, synthetic construct
  misc_feature 1..44: note = oligonucleotide decoy
  source 1..44: mol_type = other DNA
cacgtgtaaacaaacaggtgatataacagcgatggagccatttt

SEQ ID NO: 2780 - DNA, 44 bp, synthetic construct
  misc_feature 1..44: note = oligonucleotide decoy
  source 1..44: mol_type = other DNA
cacgtgtaaacaaacaggtgatataacatcgatggagccatttt

SEQ ID NO: 2781 - DNA, 44 bp, synthetic construct
  misc_feature 1..44: note = oligonucleotide decoy
  source 1..44: mol_type = other DNA
cacgtgtaaacaaacaggtgatgtaacaacgatggagccatttt

SEQ ID NO: 2782 - DNA, 44 bp, synthetic construct
  misc_feature 1..44: note = oligonucleotide decoy
  source 1..44: mol_type = other DNA
cacgtgtaaacaaacaggtgatgtaacaccgatggagccatttt

SEQ ID NO: 2783 - DNA, 44 bp, synthetic construct
  misc_feature 1..44: note = oligonucleotide decoy
  source 1..44: mol_type = other DNA
cacgtgtaaacaaacaggtgatgtaacagcgatggagccatttt

SEQ ID NO: 2784 - DNA, 44 bp, synthetic construct
  misc_feature 1..44: note = oligonucleotide decoy
  source 1..44: mol_type = other DNA
cacgtgtaaacaaacaggtgatgtaacatcgatggagccatttt

SEQ ID NO: 2785 - DNA, 44 bp, synthetic construct
  misc_feature 1..44: note = oligonucleotide decoy
  source 1..44: mol_type = other DNA
cacgtgtaaataaacaggtgacataacaacgatggagccatttt

SEQ ID NO: 2786 - DNA, 44 bp, synthetic construct
  misc_feature 1..44: note = oligonucleotide decoy
  source 1..44: mol_type = other DNA
cacgtgtaaataaacaggtgacataacaccgatggagccatttt

SEQ ID NO: 2787 - DNA, 44 bp, synthetic construct
  misc_feature 1..44: note = oligonucleotide decoy
  source 1..44: mol_type = other DNA
cacgtgtaaataaacaggtgacataacagcgatggagccatttt

SEQ ID NO: 2788 - DNA, 44 bp, synthetic construct
  misc_feature 1..44: note = oligonucleotide decoy
  source 1..44: mol_type = other DNA
cacgtgtaaataaacaggtgacataacatcgatggagccatttt

SEQ ID NO: 2789 - DNA, 44 bp, synthetic construct
  misc_feature 1..44: note = oligonucleotide decoy
  source 1..44: mol_type = other DNA
cacgtgtaaataaacaggtgacgtaacaacgatggagccatttt

SEQ ID NO: 2790 - DNA, 44 bp, synthetic construct
  misc_feature 1..44: note = oligonucleotide decoy
  source 1..44: mol_type = other DNA
cacgtgtaaataaacaggtgacgtaacaccgatggagccatttt

SEQ ID NO: 2791 - DNA, 44 bp, synthetic construct
  misc_feature 1..44: note = oligonucleotide decoy
  source 1..44: mol_type = other DNA
cacgtgtaaataaacaggtgacgtaacagcgatggagccatttt

SEQ ID NO: 2792 - DNA, 44 bp, synthetic construct
  misc_feature 1..44: note = oligonucleotide decoy
  source 1..44: mol_type = other DNA
cacgtgtaaataaacaggtgacgtaacatcgatggagccatttt

SEQ ID NO: 2793 - DNA, 44 bp, synthetic construct
  misc_feature 1..44: note = oligonucleotide decoy
  source 1..44: mol_type = other DNA
cacgtgtaaataaacaggtgatataacaacgatggagccatttt

SEQ ID NO: 2794 - DNA, 44 bp, synthetic construct
  misc_feature 1..44: note = oligonucleotide decoy
  source 1..44: mol_type = other DNA
cacgtgtaaataaacaggtgatataacaccgatggagccatttt

SEQ ID NO: 2795 - DNA, 44 bp, synthetic construct
  misc_feature 1..44: note = oligonucleotide decoy
  source 1..44: mol_type = other DNA
cacgtgtaaataaacaggtgatataacagcgatggagccatttt

SEQ ID NO: 2796 - DNA, 44 bp, synthetic construct
  misc_feature 1..44: note = oligonucleotide decoy
  source 1..44: mol_type = other DNA
cacgtgtaaataaacaggtgatataacatcgatggagccatttt

SEQ ID NO: 2797 - DNA, 44 bp, synthetic construct
  misc_feature 1..44: note = oligonucleotide decoy
  source 1..44: mol_type = other DNA
cacgtgtaaataaacaggtgatgtaacaacgatggagccatttt

SEQ ID NO: 2798 - DNA, 44 bp, synthetic construct
  misc_feature 1..44: note = oligonucleotide decoy
  source 1..44: mol_type = other DNA
cacgtgtaaataaacaggtgatgtaacaccgatggagccatttt

SEQ ID NO: 2799 - DNA, 44 bp, synthetic construct
  misc_feature 1..44: note = oligonucleotide decoy
  source 1..44: mol_type = other DNA
cacgtgtaaataaacaggtgatgtaacagcgatggagccatttt

SEQ ID NO: 2800 - DNA, 44 bp, synthetic construct
  misc_feature 1..44: note = oligonucleotide decoy
  source 1..44: mol_type = other DNA
cacgtgtaaataaacaggtgatgtaacatcgatggagccatttt

SEQ ID NO: 2801 - DNA, 44 bp, synthetic construct
  misc_feature 1..44: note = oligonucleotide decoy
  source 1..44: mol_type = other DNA
cacgtgtaaacaaacaggtgacataacaacggtggagccatctt

SEQ ID NO: 2802 - DNA, 44 bp, synthetic construct
  misc_feature 1..44: note = oligonucleotide decoy
  source 1..44: mol_type = other DNA
cacgtgtaaacaaacaggtgacataacaccggtggagccatctt

SEQ ID NO: 2803 - DNA, 44 bp, synthetic construct
  misc_feature 1..44: note = oligonucleotide decoy
  source 1..44: mol_type = other DNA
cacgtgtaaacaaacaggtgacataacagcggtggagccatctt

SEQ ID NO: 2804 - DNA, 44 bp, synthetic construct
  misc_feature 1..44: note = oligonucleotide decoy
  source 1..44: mol_type = other DNA
cacgtgtaaacaaacaggtgacataacatcggtggagccatctt

SEQ ID NO: 2805 - DNA, 44 bp, synthetic construct
  misc_feature 1..44: note = oligonucleotide decoy
  source 1..44: mol_type = other DNA
cacgtgtaaacaaacaggtgacgtaacaacggtggagccatctt

SEQ ID NO: 2806 - DNA, 44 bp, synthetic construct
  misc_feature 1..44: note = oligonucleotide decoy
  source 1..44: mol_type = other DNA
cacgtgtaaacaaacaggtgacgtaacaccggtggagccatctt

SEQ ID NO: 2807 - DNA, 44 bp, synthetic construct
  misc_feature 1..44: note = oligonucleotide decoy
  source 1..44: mol_type = other DNA
cacgtgtaaacaaacaggtgacgtaacagcggtggagccatctt

SEQ ID NO: 2808 - DNA, 44 bp, synthetic construct
  misc_feature 1..44: note = oligonucleotide decoy
  source 1..44: mol_type = other DNA
cacgtgtaaacaaacaggtgacgtaacatcggtggagccatctt

SEQ ID NO: 2809 - DNA, 44 bp, synthetic construct
  misc_feature 1..44: note = oligonucleotide decoy
  source 1..44: mol_type = other DNA
cacgtgtaaacaaacaggtgatataacaacggtggagccatctt

SEQ ID NO: 2810 - DNA, 44 bp, synthetic construct
  misc_feature 1..44: note = oligonucleotide decoy
  source 1..44: mol_type = other DNA
cacgtgtaaacaaacaggtgatataacaccggtggagccatctt

SEQ ID NO: 2811 - DNA, 44 bp, synthetic construct
  misc_feature 1..44: note = oligonucleotide decoy
  source 1..44: mol_type = other DNA
cacgtgtaaacaaacaggtgatataacagcggtggagccatctt

SEQ ID NO: 2812 - DNA, 44 bp, synthetic construct
  misc_feature 1..44: note = oligonucleotide decoy
  source 1..44: mol_type = other DNA
cacgtgtaaacaaacaggtgatataacatcggtggagccatctt

SEQ ID NO: 2813 - DNA, 44 bp, synthetic construct
  misc_feature 1..44: note = oligonucleotide decoy
  source 1..44: mol_type = other DNA
cacgtgtaaacaaacaggtgatgtaacaacggtggagccatctt

SEQ ID NO: 2814 - DNA, 44 bp, synthetic construct
  misc_feature 1..44: note = oligonucleotide decoy
  source 1..44: mol_type = other DNA
cacgtgtaaacaaacaggtgatgtaacaccggtggagccatctt

SEQ ID NO: 2815 - DNA, 44 bp, synthetic construct
  misc_feature 1..44: note = oligonucleotide decoy
  source 1..44: mol_type = other DNA
cacgtgtaaacaaacaggtgatgtaacagcggtggagccatctt

SEQ ID NO: 2816 - DNA, 44 bp, synthetic construct
  misc_feature 1..44: note = oligonucleotide decoy
  source 1..44: mol_type = other DNA
cacgtgtaaacaaacaggtgatgtaacatcggtggagccatctt

SEQ ID NO: 2817 - DNA, 44 bp, synthetic construct
  misc_feature 1..44: note = oligonucleotide decoy
  source 1..44: mol_type = other DNA
cacgtgtaaataaacaggtgacataacaacggtggagccatctt

SEQ ID NO: 2818 - DNA, 44 bp, synthetic construct
  misc_feature 1..44: note = oligonucleotide decoy
  source 1..44: mol_type = other DNA
cacgtgtaaataaacaggtgacataacaccggtggagccatctt

SEQ ID NO: 2819 - DNA, 44 bp, synthetic construct
  misc_feature 1..44: note = oligonucleotide decoy
  source 1..44: mol_type = other DNA
cacgtgtaaataaacaggtgacataacagcggtggagccatctt

SEQ ID NO: 2820 - DNA, 44 bp, synthetic construct
  misc_feature 1..44: note = oligonucleotide decoy
  source 1..44: mol_type = other DNA
cacgtgtaaataaacaggtgacataacatcggtggagccatctt

SEQ ID NO: 2821 - DNA, 44 bp, synthetic construct
  misc_feature 1..44: note = oligonucleotide decoy
  source 1..44: mol_type = other DNA
cacgtgtaaataaacaggtgacgtaacaacggtggagccatctt

SEQ ID NO: 2822 - DNA, 44 bp, synthetic construct
  misc_feature 1..44: note = oligonucleotide decoy
  source 1..44: mol_type = other DNA
cacgtgtaaataaacaggtgacgtaacaccggtggagccatctt

SEQ ID NO: 2823 - DNA, 44 bp, synthetic construct
  misc_feature 1..44: note = oligonucleotide decoy
  source 1..44: mol_type = other DNA
cacgtgtaaataaacaggtgacgtaacagcggtggagccatctt

SEQ ID NO: 2824 - DNA, 44 bp, synthetic construct
  misc_feature 1..44: note = oligonucleotide decoy
  source 1..44: mol_type = other DNA
cacgtgtaaataaacaggtgacgtaacatcggtggagccatctt

SEQ ID NO: 2825 - DNA, 44 bp, synthetic construct
  misc_feature 1..44: note = oligonucleotide decoy
  source 1..44: mol_type = other DNA
cacgtgtaaataaacaggtgatataacaacggtggagccatctt

SEQ ID NO: 2826 - DNA, 44 bp, synthetic construct
  misc_feature 1..44: note = oligonucleotide decoy
  source 1..44: mol_type = other DNA
cacgtgtaaataaacaggtgatataacaccggtggagccatctt

SEQ ID NO: 2827 - DNA, 44 bp, synthetic construct
  misc_feature 1..44: note = oligonucleotide decoy
  source 1..44: mol_type = other DNA
cacgtgtaaataaacaggtgatataacagcggtggagccatctt

SEQ ID NO: 2828 - DNA, 44 bp, synthetic construct
  misc_feature 1..44: note = oligonucleotide decoy
  source 1..44: mol_type = other DNA
cacgtgtaaataaacaggtgatataacatcggtggagccatctt

SEQ ID NO: 2829 - DNA, 44 bp, synthetic construct
  misc_feature 1..44: note = oligonucleotide decoy
  source 1..44: mol_type = other DNA
cacgtgtaaataaacaggtgatgtaacaacggtggagccatctt

SEQ ID NO: 2830 - DNA, 44 bp, synthetic construct
  misc_feature 1..44: note = oligonucleotide decoy
  source 1..44: mol_type = other DNA
cacgtgtaaataaacaggtgatgtaacaccggtggagccatctt

SEQ ID NO: 2831 - DNA, 44 bp, synthetic construct
  misc_feature 1..44: note = oligonucleotide decoy
  source 1..44: mol_type = other DNA
cacgtgtaaataaacaggtgatgtaacagcggtggagccatctt

SEQ ID NO: 2832 - DNA, 44 bp, synthetic construct
  misc_feature 1..44: note = oligonucleotide decoy
  source 1..44: mol_type = other DNA
cacgtgtaaataaacaggtgatgtaacatcggtggagccatctt

SEQ ID NO: 2833 - DNA, 44 bp, synthetic construct
  misc_feature 1..44: note = oligonucleotide decoy
  source 1..44: mol_type = other DNA
cacgtgtaaacaaacaggtgacataacaacggtggagccatttt

SEQ ID NO: 2834 - DNA, 44 bp, synthetic construct
  misc_feature 1..44: note = oligonucleotide decoy
  source 1..44: mol_type = other DNA
cacgtgtaaacaaacaggtgacataacaccggtggagccatttt

SEQ ID NO: 2835 - DNA, 44 bp, synthetic construct
  misc_feature 1..44: note = oligonucleotide decoy
  source 1..44: mol_type = other DNA
cacgtgtaaacaaacaggtgacataacagcggtggagccatttt

SEQ ID NO: 2836 - DNA, 44 bp, synthetic construct
  misc_feature 1..44: note = oligonucleotide decoy
  source 1..44: mol_type = other DNA
cacgtgtaaacaaacaggtgacataacatcggtggagccatttt

SEQ ID NO: 2837 - DNA, 44 bp, synthetic construct
  misc_feature 1..44: note = oligonucleotide decoy
  source 1..44: mol_type = other DNA
cacgtgtaaacaaacaggtgacgtaacaacggtggagccatttt

SEQ ID NO: 2838 - DNA, 44 bp, synthetic construct
  misc_feature 1..44: note = oligonucleotide decoy
  source 1..44: mol_type = other DNA
cacgtgtaaacaaacaggtgacgtaacaccggtggagccatttt

SEQ ID NO: 2839 - DNA, 44 bp, synthetic construct
  misc_feature 1..44: note = oligonucleotide decoy
  source 1..44: mol_type = other DNA
cacgtgtaaacaaacaggtgacgtaacagcggtggagccatttt

SEQ ID NO: 2840 - DNA, 44 bp, synthetic construct
  misc_feature 1..44: note = oligonucleotide decoy
  source 1..44: mol_type = other DNA
cacgtgtaaacaaacaggtgacgtaacatcggtggagccatttt

SEQ ID NO: 2841 - DNA, 44 bp, synthetic construct
  misc_feature 1..44: note = oligonucleotide decoy
  source 1..44: mol_type = other DNA
cacgtgtaaacaaacaggtgatataacaacggtggagccatttt

SEQ ID NO: 2842 - DNA, 44 bp, synthetic construct
  misc_feature 1..44: note = oligonucleotide decoy
  source 1..44: mol_type = other DNA
cacgtgtaaacaaacaggtgatataacaccggtggagccatttt

SEQ ID NO: 2843 - DNA, 44 bp, synthetic construct
  misc_feature 1..44: note = oligonucleotide decoy
  source 1..44: mol_type = other DNA
cacgtgtaaacaaacaggtgatataacagcggtggagccatttt

SEQ ID NO: 2844 - DNA, 44 bp, synthetic construct
  misc_feature 1..44: note = oligonucleotide decoy
  source 1..44: mol_type = other DNA
cacgtgtaaacaaacaggtgatataacatcggtggagccatttt

SEQ ID NO: 2845 - DNA, 44 bp, synthetic construct
  misc_feature 1..44: note = oligonucleotide decoy
  source 1..44: mol_type = other DNA
cacgtgtaaacaaacaggtgatgtaacaacggtggagccatttt

SEQ ID NO: 2846 - DNA, 44 bp, synthetic construct
  misc_feature 1..44: note = oligonucleotide decoy
  source 1..44: mol_type = other DNA
cacgtgtaaacaaacaggtgatgtaacaccggtggagccatttt

SEQ ID NO: 2847 - DNA, 44 bp, synthetic construct
  misc_feature 1..44: note = oligonucleotide decoy
  source 1..44: mol_type = other DNA
cacgtgtaaacaaacaggtgatgtaacagcggtggagccatttt

SEQ ID NO: 2848 - DNA, 44 bp, synthetic construct
  misc_feature 1..44: note = oligonucleotide decoy
  source 1..44: mol_type = other DNA
cacgtgtaaacaaacaggtgatgtaacatcggtggagccatttt

SEQ ID NO: 2849 - DNA, 44 bp, synthetic construct
  misc_feature 1..44: note = oligonucleotide decoy
  source 1..44: mol_type = other DNA
cacgtgtaaataaacaggtgacataacaacggtggagccatttt

SEQ ID NO: 2850 - DNA, 44 bp, synthetic construct
  misc_feature 1..44: note = oligonucleotide decoy
  source 1..44: mol_type = other DNA
cacgtgtaaataaacaggtgacataacaccggtggagccatttt

SEQ ID NO: 2851 - DNA, 44 bp, synthetic construct
  misc_feature 1..44: note = oligonucleotide decoy
  source 1..44: mol_type = other DNA
cacgtgtaaataaacaggtgacataacagcggtggagccatttt

SEQ ID NO: 2852 - DNA, 44 bp, synthetic construct
  misc_feature 1..44: note = oligonucleotide decoy
  source 1..44: mol_type = other DNA
cacgtgtaaataaacaggtgacataacatcggtggagccatttt

SEQ ID NO: 2853 - DNA, 44 bp, synthetic construct
  misc_feature 1..44: note = oligonucleotide decoy
  source 1..44: mol_type = other DNA
cacgtgtaaataaacaggtgacgtaacaacggtggagccatttt

SEQ ID NO: 2854 - DNA, 44 bp, synthetic construct
  misc_feature 1..44: note = oligonucleotide decoy
  source 1..44: mol_type = other DNA
cacgtgtaaataaacaggtgacgtaacaccggtggagccatttt

SEQ ID NO: 2855 - DNA, 44 bp, synthetic construct
  misc_feature 1..44: note = oligonucleotide decoy
  source 1..44: mol_type = other DNA
cacgtgtaaataaacaggtgacgtaacagcggtggagccatttt

SEQ ID NO: 2856 - DNA, 44 bp, synthetic construct
  misc_feature 1..44: note = oligonucleotide decoy
  source 1..44: mol_type = other DNA
cacgtgtaaataaacaggtgacgtaacatcggtggagccatttt

SEQ ID NO: 2857 - DNA, 44 bp, synthetic construct
  misc_feature 1..44: note = oligonucleotide decoy
  source 1..44: mol_type = other DNA
cacgtgtaaataaacaggtgatataacaacggtggagccatttt

SEQ ID NO: 2858 - DNA, 44 bp, synthetic construct
  misc_feature 1..44: note = oligonucleotide decoy
  source 1..44: mol_type = other DNA
cacgtgtaaataaacaggtgatataacaccggtggagccatttt

SEQ ID NO: 2859 - DNA, 44 bp, synthetic construct
  misc_feature 1..44: note = oligonucleotide decoy
  source 1..44: mol_type = other DNA
cacgtgtaaataaacaggtgatataacagcggtggagccatttt

SEQ ID NO: 2860 - DNA, 44 bp, synthetic construct
  misc_feature 1..44: note = oligonucleotide decoy
  source 1..44: mol_type = other DNA
cacgtgtaaataaacaggtgatataacatcggtggagccatttt

SEQ ID NO: 2861 - DNA, 44 bp, synthetic construct
  misc_feature 1..44: note = oligonucleotide decoy
  source 1..44: mol_type = other DNA
cacgtgtaaataaacaggtgatgtaacaacggtggagccatttt

SEQ ID NO: 2862 - DNA, 44 bp, synthetic construct
  misc_feature 1..44: note = oligonucleotide decoy
  source 1..44: mol_type = other DNA
cacgtgtaaataaacaggtgatgtaacaccggtggagccatttt

SEQ ID NO: 2863 - DNA, 44 bp, synthetic construct
  misc_feature 1..44: note = oligonucleotide decoy
  source 1..44: mol_type = other DNA
cacgtgtaaataaacaggtgatgtaacagcggtggagccatttt

SEQ ID NO: 2864 - DNA, 44 bp, synthetic construct
  misc_feature 1..44: note = oligonucleotide decoy
  source 1..44: mol_type = other DNA
cacgtgtaaataaacaggtgatgtaacatcggtggagccatttt

SEQ ID NO: 2865 - DNA, 44 bp, synthetic construct
  misc_feature 1..44: note = oligonucleotide decoy
  source 1..44: mol_type = other DNA
cacgtgtaaacaaacacctgttacatcaccgatggagccatctt

SEQ ID NO: 2866 - DNA, 44 bp, synthetic construct
  misc_feature 1..44: note = oligonucleotide decoy
  source 1..44: mol_type = other DNA
cacgtgtaaacaaacacctgttacatcatcgatggagccatctt

SEQ ID NO: 2867 - DNA, 44 bp, synthetic construct
  misc_feature 1..44: note = oligonucleotide decoy
  source 1..44: mol_type = other DNA
cacgtgtaaacaaacacctgttacgtcaccgatggagccatctt

SEQ ID NO: 2868 - DNA, 44 bp, synthetic construct
  misc_feature 1..44: note = oligonucleotide decoy
  source 1..44: mol_type = other DNA
cacgtgtaaacaaacacctgttacgtcatcgatggagccatctt

SEQ ID NO: 2869 - DNA, 44 bp, synthetic construct
  misc_feature 1..44: note = oligonucleotide decoy
  source 1..44: mol_type = other DNA
cacgtgtaaacaaacacctgttatatcaccgatggagccatctt

SEQ ID NO: 2870 - DNA, 44 bp, synthetic construct
  misc_feature 1..44: note = oligonucleotide decoy
  source 1..44: mol_type = other DNA
cacgtgtaaacaaacacctgttatatcatcgatggagccatctt

SEQ ID NO: 2871 - DNA, 44 bp, synthetic construct
  misc_feature 1..44: note = oligonucleotide decoy
  source 1..44: mol_type = other DNA
cacgtgtaaacaaacacctgttatgtcaccgatggagccatctt

SEQ ID NO: 2872 - DNA, 44 bp, synthetic construct
  misc_feature 1..44: note = oligonucleotide decoy
  source 1..44: mol_type = other DNA
cacgtgtaaacaaacacctgttatgtcatcgatggagccatctt

SEQ ID NO: 2873 - DNA, 44 bp, synthetic construct
  misc_feature 1..44: note = oligonucleotide decoy
  source 1..44: mol_type = other DNA
cacgtgtaaataaacacctgttacatcaccgatggagccatctt

SEQ ID NO: 2874 - DNA, 44 bp, synthetic construct
  misc_feature 1..44: note = oligonucleotide decoy
  source 1..44: mol_type = other DNA
cacgtgtaaataaacacctgttacatcatcgatggagccatctt

SEQ ID NO: 2875 - DNA, 44 bp, synthetic construct
  misc_feature 1..44: note = oligonucleotide decoy
  source 1..44: mol_type = other DNA
cacgtgtaaataaacacctgttacgtcaccgatggagccatctt

SEQ ID NO: 2876 - DNA, 44 bp, synthetic construct
  misc_feature 1..44: note = oligonucleotide decoy
  source 1..44: mol_type = other DNA
cacgtgtaaataaacacctgttacgtcatcgatggagccatctt

SEQ ID NO: 2877 - DNA, 44 bp, synthetic construct
  misc_feature 1..44: note = oligonucleotide decoy
  source 1..44: mol_type = other DNA
cacgtgtaaataaacacctgttatatcaccgatggagccatctt

SEQ ID NO: 2878 - DNA, 44 bp, synthetic construct
  misc_feature 1..44: note = oligonucleotide decoy
  source 1..44: mol_type = other DNA
cacgtgtaaataaacacctgttatatcatcgatggagccatctt

SEQ ID NO: 2879 - DNA, 44 bp, synthetic construct
  misc_feature 1..44: note = oligonucleotide decoy
  source 1..44: mol_type = other DNA
cacgtgtaaataaacacctgttatgtcaccgatggagccatctt

SEQ ID NO: 2880 - DNA, 44 bp, synthetic construct
  misc_feature 1..44: note = oligonucleotide decoy
  source 1..44: mol_type = other DNA
cacgtgtaaataaacacctgttatgtcatcgatggagccatctt

SEQ ID NO: 2881 - DNA, 44 bp, synthetic construct
  misc_feature 1..44: note = oligonucleotide decoy
  source 1..44: mol_type = other DNA
cacgtgtaaacaaacacctgttacatcaccgatggagccatttt

SEQ ID NO: 2882 - DNA, 44 bp, synthetic construct
  misc_feature 1..44: note = oligonucleotide decoy
  source 1..44: mol_type = other DNA
cacgtgtaaacaaacacctgttacatcatcgatggagccatttt

SEQ ID NO: 2883 - DNA, 44 bp, synthetic construct
  misc_feature 1..44: note = oligonucleotide decoy
  source 1..44: mol_type = other DNA
cacgtgtaaacaaacacctgttacgtcaccgatggagccatttt

SEQ ID NO: 2884 - DNA, 44 bp, synthetic construct
  misc_feature 1..44: note = oligonucleotide decoy
  source 1..44: mol_type = other DNA
cacgtgtaaacaaacacctgttacgtcatcgatggagccatttt

SEQ ID NO: 2885 - DNA, 44 bp, synthetic construct
  misc_feature 1..44: note = oligonucleotide decoy
  source 1..44: mol_type = other DNA
cacgtgtaaacaaacacctgttatatcaccgatggagccatttt

SEQ ID NO: 2886 - DNA, 44 bp, synthetic construct
  misc_feature 1..44: note = oligonucleotide decoy
  source 1..44: mol_type = other DNA
cacgtgtaaacaaacacctgttatatcatcgatggagccatttt

SEQ ID NO: 2887 - DNA, 44 bp, synthetic construct
  misc_feature 1..44: note = oligonucleotide decoy
  source 1..44: mol_type = other DNA
cacgtgtaaacaaacacctgttatgtcaccgatggagccatttt

SEQ ID NO: 2888 - DNA, 44 bp, synthetic construct
  misc_feature 1..44: note = oligonucleotide decoy
  source 1..44: mol_type = other DNA
cacgtgtaaacaaacacctgttatgtcatcgatggagccatttt

SEQ ID NO: 2889 - DNA, 44 bp, synthetic construct
  misc_feature 1..44: note = oligonucleotide decoy
  source 1..44: mol_type = other DNA
cacgtgtaaataaacacctgttacatcaccgatggagccatttt

SEQ ID NO: 2890 - DNA, 44 bp, synthetic construct
  misc_feature 1..44: note = oligonucleotide decoy
  source 1..44: mol_type = other DNA
cacgtgtaaataaacacctgttacatcatcgatggagccatttt

SEQ ID NO: 2891 - DNA, 44 bp, synthetic construct
  misc_feature 1..44: note = oligonucleotide decoy
  source 1..44: mol_type = other DNA
cacgtgtaaataaacacctgttacgtcaccgatggagccatttt

SEQ ID NO: 2892 - DNA, 44 bp, synthetic construct
  misc_feature 1..44: note = oligonucleotide decoy
  source 1..44: mol_type = other DNA
cacgtgtaaataaacacctgttacgtcatcgatggagccatttt

SEQ ID NO: 2893 - DNA, 44 bp, synthetic construct
  misc_feature 1..44: note = oligonucleotide decoy
  source 1..44: mol_type = other DNA
cacgtgtaaataaacacctgttatatcaccgatggagccatttt

SEQ ID NO: 2894 - DNA, 44 bp, synthetic construct
  misc_feature 1..44: note = oligonucleotide decoy
  source 1..44: mol_type = other DNA
cacgtgtaaataaacacctgttatatcatcgatggagccatttt

SEQ ID NO: 2895 - DNA, 44 bp, synthetic construct
  misc_feature 1..44: note = oligonucleotide decoy
  source 1..44: mol_type = other DNA
cacgtgtaaataaacacctgttatgtcaccgatggagccatttt

SEQ ID NO: 2896 - DNA, 44 bp, synthetic construct
  misc_feature 1..44: note = oligonucleotide decoy
  source 1..44: mol_type = other DNA
cacgtgtaaataaacacctgttatgtcatcgatggagccatttt

SEQ ID NO: 2897 - DNA, 44 bp, synthetic construct
  misc_feature 1..44: note = oligonucleotide decoy
  source 1..44: mol_type = other DNA
cacgtgtaaacaaacacctgttacatcaccggtggagccatctt

SEQ ID NO: 2898 - DNA, 44 bp, synthetic construct
  misc_feature 1..44: note = oligonucleotide decoy
  source 1..44: mol_type = other DNA
cacgtgtaaacaaacacctgttacatcatcggtggagccatctt

SEQ ID NO: 2899 - DNA, 44 bp, synthetic construct
  misc_feature 1..44: note = oligonucleotide decoy
  source 1..44: mol_type = other DNA
cacgtgtaaacaaacacctgttacgtcaccggtggagccatctt

SEQ ID NO: 2900 - DNA, 44 bp, synthetic construct
  misc_feature 1..44: note = oligonucleotide decoy
  source 1..44: mol_type = other DNA
cacgtgtaaacaaacacctgttacgtcatcggtggagccatctt

SEQ ID NO: 2901 - DNA, 44 bp, synthetic construct
  misc_feature 1..44: note = oligonucleotide decoy
  source 1..44: mol_type = other DNA
cacgtgtaaacaaacacctgttatatcaccggtggagccatctt

SEQ ID NO: 2902 - DNA, 44 bp, synthetic construct
  misc_feature 1..44: note = oligonucleotide decoy
  source 1..44: mol_type = other DNA
cacgtgtaaacaaacacctgttatatcatcggtggagccatctt

SEQ ID NO: 2903 - DNA, 44 bp, synthetic construct
  misc_feature 1..44: note = oligonucleotide decoy
  source 1..44: mol_type = other DNA
cacgtgtaaacaaacacctgttatgtcaccggtggagccatctt

SEQ ID NO: 2904 - DNA, 44 bp, synthetic construct
  misc_feature 1..44: note = oligonucleotide decoy
  source 1..44: mol_type = other DNA
cacgtgtaaacaaacacctgttatgtcatcggtggagccatctt

SEQ ID NO: 2905 - DNA, 44 bp, synthetic construct
  misc_feature 1..44: note = oligonucleotide decoy
  source 1..44: mol_type = other DNA
cacgtgtaaataaacacctgttacatcaccggtggagccatctt

SEQ ID NO: 2906 - DNA, 44 bp, synthetic construct
  misc_feature 1..44: note = oligonucleotide decoy
  source 1..44: mol_type = other DNA
cacgtgtaaataaacacctgttacatcatcggtggagccatctt

SEQ ID NO: 2907 - DNA, 44 bp, synthetic construct
  misc_feature 1..44: note = oligonucleotide decoy
  source 1..44: mol_type = other DNA
cacgtgtaaataaacacctgttacgtcaccggtggagccatctt

SEQ ID NO: 2908 - DNA, 44 bp, synthetic construct
  misc_feature 1..44: note = oligonucleotide decoy
  source 1..44: mol_type = other DNA
cacgtgtaaataaacacctgttacgtcatcggtggagccatctt

SEQ ID NO: 2909 - DNA, 44 bp, synthetic construct
  misc_feature 1..44: note = oligonucleotide decoy
  source 1..44: mol_type = other DNA
cacgtgtaaataaacacctgttatatcaccggtggagccatctt

SEQ ID NO: 2910 - DNA, 44 bp, synthetic construct
  misc_feature 1..44: note = oligonucleotide decoy
  source 1..44: mol_type = other DNA
cacgtgtaaataaacacctgttatatcatcggtggagccatctt

SEQ ID NO: 2911 - DNA, 44 bp, synthetic construct
  misc_feature 1..44: note = oligonucleotide decoy
  source 1..44: mol_type = other DNA
cacgtgtaaataaacacctgttatgtcaccggtggagccatctt

SEQ ID NO: 2912 - DNA, 44 bp, synthetic construct
  misc_feature 1..44: note = oligonucleotide decoy
  source 1..44: mol_type = other DNA
cacgtgtaaataaacacctgttatgtcatcggtggagccatctt

SEQ ID NO: 2913 - DNA, 44 bp, synthetic construct
  misc_feature 1..44: note = oligonucleotide decoy
  source 1..44: mol_type = other DNA
cacgtgtaaacaaacacctgttacatcaccggtggagccatttt

SEQ ID NO: 2914 - DNA, 44 bp, synthetic construct
  misc_feature 1..44: note = oligonucleotide decoy
  source 1..44: mol_type = other DNA
cacgtgtaaacaaacacctgttacatcatcggtggagccatttt

SEQ ID NO: 2915 - DNA, 44 bp, synthetic construct
  misc_feature 1..44: note = oligonucleotide decoy
  source 1..44: mol_type = other DNA
cacgtgtaaacaaacacctgttacgtcaccggtggagccatttt

SEQ ID NO: 2916 - DNA, 44 bp, synthetic construct
  misc_feature 1..44: note = oligonucleotide decoy
  source 1..44: mol_type = other DNA
cacgtgtaaacaaacacctgttacgtcatcggtggagccatttt

SEQ ID NO: 2917 - DNA, 44 bp, synthetic construct
  misc_feature 1..44: note = oligonucleotide decoy
  source 1..44: mol_type = other DNA
cacgtgtaaacaaacacctgttatatcaccggtggagccatttt

SEQ ID NO: 2918 - DNA, 44 bp, synthetic construct
  misc_feature 1..44: note = oligonucleotide decoy
  source 1..44: mol_type = other DNA
cacgtgtaaacaaacacctgttatatcatcggtggagccatttt

SEQ ID NO: 2919 - DNA, 44 bp, synthetic construct
  misc_feature 1..44: note = oligonucleotide decoy
  source 1..44: mol_type = other DNA
cacgtgtaaacaaacacctgttatgtcaccggtggagccatttt

SEQ ID NO: 2920 - DNA, 44 bp, synthetic construct
  misc_feature 1..44: note = oligonucleotide decoy
  source 1..44: mol_type = other DNA
cacgtgtaaacaaacacctgttatgtcatcggtggagccatttt

SEQ ID NO: 2921 - DNA, 44 bp, synthetic construct
  misc_feature 1..44: note = oligonucleotide decoy
  source 1..44: mol_type = other DNA
cacgtgtaaataaacacctgttacatcaccggtggagccatttt

SEQ ID NO: 2922 - DNA, 44 bp, synthetic construct
  misc_feature 1..44: note = oligonucleotide decoy
  source 1..44: mol_type = other DNA
cacgtgtaaataaacacctgttacatcatcggtggagccatttt

SEQ ID NO: 2923 - DNA, 44 bp, synthetic construct
  misc_feature 1..44: note = oligonucleotide decoy
  source 1..44: mol_type = other DNA
cacgtgtaaataaacacctgttacgtcaccggtggagccatttt

SEQ ID NO: 2924 - DNA, 44 bp, synthetic construct
  misc_feature 1..44: note = oligonucleotide decoy
  source 1..44: mol_type = other DNA
cacgtgtaaataaacacctgttacgtcatcggtggagccatttt

SEQ ID NO: 2925 - DNA, 44 bp, synthetic construct
  misc_feature 1..44: note = oligonucleotide decoy
  source 1..44: mol_type = other DNA
cacgtgtaaataaacacctgttatatcaccggtggagccatttt

SEQ ID NO: 2926 - DNA, 44 bp, synthetic construct
  misc_feature 1..44: note = oligonucleotide decoy
  source 1..44: mol_type = other DNA
cacgtgtaaataaacacctgttatatcatcggtggagccatttt

SEQ ID NO: 2927 - DNA, 44 bp, synthetic construct
  misc_feature 1..44: note = oligonucleotide decoy
  source 1..44: mol_type = other DNA
cacgtgtaaataaacacctgttatgtcaccggtggagccatttt

SEQ ID NO: 2928 - DNA, 44 bp, synthetic construct
  misc_feature 1..44: note = oligonucleotide decoy
  source 1..44: mol_type = other DNA
cacgtgtaaataaacacctgttatgtcatcggtggagccatttt

SEQ ID NO: 2929 - DNA, 44 bp, synthetic construct
  misc_feature 1..44: note = oligonucleotide decoy
  source 1..44: mol_type = other DNA
cacgtgtaaacaaacaggtgttacatcaccgatggagccatctt

SEQ ID NO: 2930 - DNA, 44 bp, synthetic construct
  misc_feature 1..44: note = oligonucleotide decoy
  source 1..44: mol_type = other DNA
cacgtgtaaacaaacaggtgttacatcatcgatggagccatctt

SEQ ID NO: 2931 - DNA, 44 bp, synthetic construct
  misc_feature 1..44: note = oligonucleotide decoy
  source 1..44: mol_type = other DNA
cacgtgtaaacaaacaggtgttacgtcaccgatggagccatctt

SEQ ID NO: 2932 - DNA, 44 bp, synthetic construct
  misc_feature 1..44: note = oligonucleotide decoy
  source 1..44: mol_type = other DNA
cacgtgtaaacaaacaggtgttacgtcatcgatggagccatctt

SEQ ID NO: 2933 - DNA, 44 bp, synthetic construct
  misc_feature 1..44: note = oligonucleotide decoy
  source 1..44: mol_type = other DNA
cacgtgtaaacaaacaggtgttatatcaccgatggagccatctt

SEQ ID NO: 2934 - DNA, 44 bp, synthetic construct
  misc_feature 1..44: note = oligonucleotide decoy
  source 1..44: mol_type = other DNA
cacgtgtaaacaaacaggtgttatatcatcgatggagccatctt

SEQ ID NO: 2935 - DNA, 44 bp, synthetic construct
  misc_feature 1..44: note = oligonucleotide decoy
  source 1..44: mol_type = other DNA
cacgtgtaaacaaacaggtgttatgtcaccgatggagccatctt

SEQ ID NO: 2936 - DNA, 44 bp, synthetic construct
  misc_feature 1..44: note = oligonucleotide decoy
  source 1..44: mol_type = other DNA
cacgtgtaaacaaacaggtgttatgtcatcgatggagccatctt

SEQ ID NO: 2937 - DNA, 44 bp, synthetic construct
  misc_feature 1..44: note = oligonucleotide decoy
  source 1..44: mol_type = other DNA
cacgtgtaaataaacaggtgttacatcaccgatggagccatctt

SEQ ID NO: 2938 - DNA, 44 bp, synthetic construct
  misc_feature 1..44: note = oligonucleotide decoy
  source 1..44: mol_type = other DNA
cacgtgtaaataaacaggtgttacatcatcgatggagccatctt

SEQ ID NO: 2939 - DNA, 44 bp, synthetic construct
  misc_feature 1..44: note = oligonucleotide decoy
  source 1..44: mol_type = other DNA
cacgtgtaaataaacaggtgttacgtcaccgatggagccatctt

SEQ ID NO: 2940 - DNA, 44 bp, synthetic construct
  misc_feature 1..44: note = oligonucleotide decoy
  source 1..44: mol_type = other DNA
cacgtgtaaataaacaggtgttacgtcatcgatggagccatctt

SEQ ID NO: 2941 - DNA, 44 bp, synthetic construct
  misc_feature 1..44: note = oligonucleotide decoy
  source 1..44: mol_type = other DNA
cacgtgtaaataaacaggtgttatatcaccgatggagccatctt

SEQ ID NO: 2942 - DNA, 44 bp, synthetic construct
  misc_feature 1..44: note = oligonucleotide decoy
  source 1..44: mol_type = other DNA
cacgtgtaaataaacaggtgttatatcatcgatggagccatctt

SEQ ID NO: 2943 - DNA, 44 bp, synthetic construct
  misc_feature 1..44: note = oligonucleotide decoy
  source 1..44: mol_type = other DNA
cacgtgtaaataaacaggtgttatgtcaccgatggagccatctt

SEQ ID NO: 2944 - DNA, 44 bp, synthetic construct
  misc_feature 1..44: note = oligonucleotide decoy
  source 1..44: mol_type = other DNA
cacgtgtaaataaacaggtgttatgtcatcgatggagccatctt

SEQ ID NO: 2945 - DNA, 44 bp, synthetic construct
  misc_feature 1..44: note = oligonucleotide decoy
  source 1..44: mol_type = other DNA
cacgtgtaaacaaacaggtgttacatcaccgatggagccatttt

SEQ ID NO: 2946 - DNA, 44 bp, synthetic construct
  misc_feature 1..44: note = oligonucleotide decoy
  source 1..44: mol_type = other DNA
cacgtgtaaacaaacaggtgttacatcatcgatggagccatttt

SEQ ID NO: 2947 - DNA, 44 bp, synthetic construct
  misc_feature 1..44: note = oligonucleotide decoy
  source 1..44: mol_type = other DNA
cacgtgtaaacaaacaggtgttacgtcaccgatggagccatttt

SEQ ID NO: 2948 - DNA, 44 bp, synthetic construct
  misc_feature 1..44: note = oligonucleotide decoy
  source 1..44: mol_type = other DNA
cacgtgtaaacaaacaggtgttacgtcatcgatggagccatttt

SEQ ID NO: 2949 - DNA, 44 bp, synthetic construct
  misc_feature 1..44: note = oligonucleotide decoy
  source 1..44: mol_type = other DNA
cacgtgtaaacaaacaggtgttatatcaccgatggagccatttt

SEQ ID NO: 2950 - DNA, 44 bp, synthetic construct
  misc_feature 1..44: note = oligonucleotide decoy
  source 1..44: mol_type = other DNA
cacgtgtaaacaaacaggtgttatatcatcgatggagccatttt

SEQ ID NO: 2951 - DNA, 44 bp, synthetic construct
  misc_feature 1..44: note = oligonucleotide decoy
  source 1..44: mol_type = other DNA
cacgtgtaaacaaacaggtgttatgtcaccgatggagccatttt

SEQ ID NO: 2952 - DNA, 44 bp, synthetic construct
  misc_feature 1..44: note = oligonucleotide decoy
  source 1..44: mol_type = other DNA
cacgtgtaaacaaacaggtgttatgtcatcgatggagccatttt

SEQ ID NO: 2953 - DNA, 44 bp, synthetic construct
  misc_feature 1..44: note = oligonucleotide decoy
  source 1..44: mol_type = other DNA
cacgtgtaaataaacaggtgttacatcaccgatggagccatttt

SEQ ID NO: 2954 - DNA, 44 bp, synthetic construct
  misc_feature 1..44: note = oligonucleotide decoy
  source 1..44: mol_type = other DNA
cacgtgtaaataaacaggtgttacatcatcgatggagccatttt

SEQ ID NO: 2955 - DNA, 44 bp, synthetic construct
  misc_feature 1..44: note = oligonucleotide decoy
  source 1..44: mol_type = other DNA
cacgtgtaaataaacaggtgttacgtcaccgatggagccatttt

SEQ ID NO: 2956 - DNA, 44 bp, synthetic construct
  misc_feature 1..44: note = oligonucleotide decoy
  source 1..44: mol_type = other DNA
cacgtgtaaataaacaggtgttacgtcatcgatggagccatttt

SEQ ID NO: 2957 - DNA, 44 bp, synthetic construct
  misc_feature 1..44: note = oligonucleotide decoy
  source 1..44: mol_type = other DNA
cacgtgtaaataaacaggtgttatatcaccgatggagccatttt

SEQ ID NO: 2958 - DNA, 44 bp, synthetic construct
  misc_feature 1..44: note = oligonucleotide decoy
  source 1..44: mol_type = other DNA
cacgtgtaaataaacaggtgttatatcatcgatggagccatttt

SEQ ID NO: 2959 - DNA, 44 bp, synthetic construct
  misc_feature 1..44: note = oligonucleotide decoy
  source 1..44: mol_type = other DNA
cacgtgtaaataaacaggtgttatgtcaccgatggagccatttt

SEQ ID NO: 2960 - DNA, 44 bp, synthetic construct
  misc_feature 1..44: note = oligonucleotide decoy
  source 1..44: mol_type = other DNA
cacgtgtaaataaacaggtgttatgtcatcgatggagccatttt

SEQ ID NO: 2961 - DNA, 44 bp, synthetic construct
  misc_feature 1..44: note = oligonucleotide decoy
  source 1..44: mol_type = other DNA
cacgtgtaaacaaacaggtgttacatcaccggtggagccatctt

SEQ ID NO: 2962 - DNA, 44 bp, synthetic construct
  misc_feature 1..44: note = oligonucleotide decoy
  source 1..44: mol_type = other DNA
cacgtgtaaacaaacaggtgttacatcatcggtggagccatctt

SEQ ID NO: 2963 - DNA, 44 bp, synthetic construct
  misc_feature 1..44: note = oligonucleotide decoy
  source 1..44: mol_type = other DNA
cacgtgtaaacaaacaggtgttacgtcaccggtggagccatctt

SEQ ID NO: 2964 - DNA, 44 bp, synthetic construct
  misc_feature 1..44: note = oligonucleotide decoy
  source 1..44: mol_type = other DNA
cacgtgtaaacaaacaggtgttacgtcatcggtggagccatctt

SEQ ID NO: 2965 - DNA, 44 bp, synthetic construct
  misc_feature 1..44: note = oligonucleotide decoy
  source 1..44: mol_type = other DNA
cacgtgtaaacaaacaggtgttatatcaccggtggagccatctt

SEQ ID NO: 2966 - DNA, 44 bp, synthetic construct
  misc_feature 1..44: note = oligonucleotide decoy
  source 1..44: mol_type = other DNA
cacgtgtaaacaaacaggtgttatatcatcggtggagccatctt

SEQ ID NO: 2967 - DNA, 44 bp, synthetic construct
  misc_feature 1..44: note = oligonucleotide decoy
  source 1..44: mol_type = other DNA
cacgtgtaaacaaacaggtgttatgtcaccggtggagccatctt

SEQ ID NO: 2968 - DNA, 44 bp, synthetic construct
  misc_feature 1..44: note = oligonucleotide decoy
  source 1..44: mol_type = other DNA
cacgtgtaaacaaacaggtgttatgtcatcggtggagccatctt

SEQ ID NO: 2969 - DNA, 44 bp, synthetic construct
  misc_feature 1..44: note = oligonucleotide decoy
  source 1..44: mol_type = other DNA
cacgtgtaaataaacaggtgttacatcaccggtggagccatctt

SEQ ID NO: 2970 - DNA, 44 bp, synthetic construct
  misc_feature 1..44: note = oligonucleotide decoy
  source 1..44: mol_type = other DNA
cacgtgtaaataaacaggtgttacatcatcggtggagccatctt

SEQ ID NO: 2971 - DNA, 44 bp, synthetic construct
  misc_feature 1..44: note = oligonucleotide decoy
  source 1..44: mol_type = other DNA
cacgtgtaaataaacaggtgttacgtcaccggtggagccatctt

SEQ ID NO: 2972 - DNA, 44 bp, synthetic construct
  misc_feature 1..44: note = oligonucleotide decoy
  source 1..44: mol_type = other DNA
cacgtgtaaataaacaggtgttacgtcatcggtggagccatctt

SEQ ID NO: 2973 - DNA, 44 bp, synthetic construct
  misc_feature 1..44: note = oligonucleotide decoy
  source 1..44: mol_type = other DNA
cacgtgtaaataaacaggtgttatatcaccggtggagccatctt

SEQ ID NO: 2974 - DNA, 44 bp, synthetic construct
  misc_feature 1..44: note = oligonucleotide decoy
  source 1..44: mol_type = other DNA
cacgtgtaaataaacaggtgttatatcatcggtggagccatctt

SEQ ID NO: 2975 - DNA, 44 bp, synthetic construct
  misc_feature 1..44: note = oligonucleotide decoy
  source 1..44: mol_type = other DNA
cacgtgtaaataaacaggtgttatgtcaccggtggagccatctt

SEQ ID NO: 2976 - DNA, 44 bp, synthetic construct
  misc_feature 1..44: note = oligonucleotide decoy
  source 1..44: mol_type = other DNA
cacgtgtaaataaacaggtgttatgtcatcggtggagccatctt

SEQ ID NO: 2977 - DNA, 44 bp, synthetic construct
  misc_feature 1..44: note = oligonucleotide decoy
  source 1..44: mol_type = other DNA
cacgtgtaaacaaacaggtgttacatcaccggtggagccatttt

SEQ ID NO: 2978 - DNA, 44 bp, synthetic construct
  misc_feature 1..44: note = oligonucleotide decoy
  source 1..44: mol_type = other DNA
cacgtgtaaacaaacaggtgttacatcatcggtggagccatttt

SEQ ID NO: 2979 - DNA, 44 bp, synthetic construct
  misc_feature 1..44: note = oligonucleotide decoy
  source 1..44: mol_type = other DNA
cacgtgtaaacaaacaggtgttacgtcaccggtggagccatttt

SEQ ID NO: 2980 - DNA, 44 bp, synthetic construct
  misc_feature 1..44: note = oligonucleotide decoy
  source 1..44: mol_type = other DNA
cacgtgtaaacaaacaggtgttacgtcatcggtggagccatttt

SEQ ID NO: 2981 - DNA, 44 bp, synthetic construct
  misc_feature 1..44: note = oligonucleotide decoy
  source 1..44: mol_type = other DNA
cacgtgtaaacaaacaggtgttatatcaccggtggagccatttt

SEQ ID NO: 2982 - DNA, 44 bp, synthetic construct
  misc_feature 1..44: note = oligonucleotide decoy
  source 1..44: mol_type = other DNA
cacgtgtaaacaaacaggtgttatatcatcggtggagccatttt

SEQ ID NO: 2983 - DNA, 44 bp, synthetic construct
  misc_feature 1..44: note = oligonucleotide decoy
  source 1..44: mol_type = other DNA
cacgtgtaaacaaacaggtgttatgtcaccggtggagccatttt

SEQ ID NO: 2984 - DNA, 44 bp, synthetic construct
  misc_feature 1..44: note = oligonucleotide decoy
  source 1..44: mol_type = other DNA
cacgtgtaaacaaacaggtgttatgtcatcggtggagccatttt

SEQ ID NO: 2985 - DNA, 44 bp, synthetic construct
  misc_feature 1..44: note = oligonucleotide decoy
  source 1..44: mol_type = other DNA
cacgtgtaaataaacaggtgttacatcaccggtggagccatttt

SEQ ID NO: 2986 - DNA, 44 bp, synthetic construct
  misc_feature 1..44: note = oligonucleotide decoy
  source 1..44: mol_type = other DNA
cacgtgtaaataaacaggtgttacatcatcggtggagccatttt

SEQ ID NO: 2987 - DNA, 44 bp, synthetic construct
  misc_feature 1..44: note = oligonucleotide decoy
  source 1..44: mol_type = other DNA
cacgtgtaaataaacaggtgttacgtcaccggtggagccatttt

SEQ ID NO: 2988 - DNA, 44 bp, synthetic construct
  misc_feature 1..44: note = oligonucleotide decoy
  source 1..44: mol_type = other DNA
cacgtgtaaataaacaggtgttacgtcatcggtggagccatttt

SEQ ID NO: 2989 - DNA, 44 bp, synthetic construct
  misc_feature 1..44: note = oligonucleotide decoy
  source 1..44: mol_type = other DNA
cacgtgtaaataaacaggtgttatatcaccggtggagccatttt

SEQ ID NO: 2990 - DNA, 44 bp, synthetic construct
  misc_feature 1..44: note = oligonucleotide decoy
  source 1..44: mol_type = other DNA
cacgtgtaaataaacaggtgttatatcatcggtggagccatttt

SEQ ID NO: 2991 - DNA, 44 bp, synthetic construct
  misc_feature 1..44: note = oligonucleotide decoy
  source 1..44: mol_type = other DNA
cacgtgtaaataaacaggtgttatgtcaccggtggagccatttt

SEQ ID NO: 2992 - DNA, 44 bp, synthetic construct
  misc_feature 1..44: note = oligonucleotide decoy
  source 1..44: mol_type = other DNA
cacgtgtaaataaacaggtgttatgtcatcggtggagccatttt

SEQ ID NO: 2993 - DNA, 44 bp, synthetic construct
  misc_feature 1..44: note = oligonucleotide decoy
  source 1..44: mol_type = other DNA
cacgtgtaaacaaacaacgatgacataacaggtggagccatctt

SEQ ID NO: 2994 - DNA, 44 bp, synthetic construct
  misc_feature 1..44: note = oligonucleotide decoy
  source 1..44: mol_type = other DNA
cacgtgtaaacaaacaacgatgacgtaacaggtggagccatctt

SEQ ID NO: 2995 - DNA, 44 bp, synthetic construct
  misc_feature 1..44: note = oligonucleotide decoy
  source 1..44: mol_type = other DNA
cacgtgtaaacaaacaacgatgatataacaggtggagccatctt

SEQ ID NO: 2996 - DNA, 44 bp, synthetic construct
  misc_feature 1..44: note = oligonucleotide decoy
  source 1..44: mol_type = other DNA
cacgtgtaaacaaacaacgatgatgtaacaggtggagccatctt

SEQ ID NO: 2997 - DNA, 44 bp, synthetic construct
  misc_feature 1..44: note = oligonucleotide decoy
  source 1..44: mol_type = other DNA
cacgtgtaaacaaacaacggtgacataacaggtggagccatctt

SEQ ID NO: 2998 - DNA, 44 bp, synthetic construct
  misc_feature 1..44: note = oligonucleotide decoy
  source 1..44: mol_type = other DNA
cacgtgtaaacaaacaacggtgacgtaacaggtggagccatctt

SEQ ID NO: 2999 - DNA, 44 bp, synthetic construct
  misc_feature 1..44: note = oligonucleotide decoy
  source 1..44: mol_type = other DNA
cacgtgtaaacaaacaacggtgatataacaggtggagccatctt

SEQ ID NO: 3000 - DNA, 44 bp, synthetic construct
  misc_feature 1..44: note = oligonucleotide decoy
  source 1..44: mol_type = other DNA
cacgtgtaaacaaacaacggtgatgtaacaggtggagccatctt

SEQ ID NO: 3001 - DNA, 44 bp, synthetic construct
  misc_feature 1..44: note = oligonucleotide decoy
  source 1..44: mol_type = other DNA
cacgtgtaaacaaacaccgatgacataacaggtggagccatctt

SEQ ID NO: 3002 - DNA, 44 bp, synthetic construct
  misc_feature 1..44: note = oligonucleotide decoy
  source 1..44: mol_type = other DNA
cacgtgtaaacaaacaccgatgacgtaacaggtggagccatctt

SEQ ID NO: 3003 - DNA, 44 bp, synthetic construct
  misc_feature 1..44: note = oligonucleotide decoy
  source 1..44: mol_type = other DNA
cacgtgtaaacaaacaccgatgatataacaggtggagccatctt

SEQ ID NO: 3004 - DNA, 44 bp, synthetic construct
  misc_feature 1..44: note = oligonucleotide decoy
  source 1..44: mol_type = other DNA
cacgtgtaaacaaacaccgatgatgtaacaggtggagccatctt

SEQ ID NO: 3005 - DNA, 44 bp, synthetic construct
  misc_feature 1..44: note = oligonucleotide decoy
  source 1..44: mol_type = other DNA
cacgtgtaaacaaacaccggtgacataacaggtggagccatctt

SEQ ID NO: 3006 - DNA, 44 bp, synthetic construct
  misc_feature 1..44: note = oligonucleotide decoy
  source 1..44: mol_type = other DNA
cacgtgtaaacaaacaccggtgacgtaacaggtggagccatctt

SEQ ID NO: 3007 - DNA, 44 bp, synthetic construct
  misc_feature 1..44: note = oligonucleotide decoy
  source 1..44: mol_type = other DNA
cacgtgtaaacaaacaccggtgatataacaggtggagccatctt

SEQ ID NO: 3008 - DNA, 44 bp, synthetic construct
  misc_feature 1..44: note = oligonucleotide decoy
  source 1..44: mol_type = other DNA
cacgtgtaaacaaacaccggtgatgtaacaggtggagccatctt

SEQ ID NO: 3009 - DNA, 44 bp, synthetic construct
  misc_feature 1..44: note = oligonucleotide decoy
  source 1..44: mol_type = other DNA
cacgtgtaaacaaacagcgatgacataacaggtggagccatctt

SEQ ID NO: 3010 - DNA, 44 bp, synthetic construct
  misc_feature 1..44: note = oligonucleotide decoy
  source 1..44: mol_type = other DNA
cacgtgtaaacaaacagcgatgacgtaacaggtggagccatctt

SEQ ID NO: 3011 - DNA, 44 bp, synthetic construct
  misc_feature 1..44: note = oligonucleotide decoy
  source 1..44: mol_type = other DNA
cacgtgtaaacaaacagcgatgatataacaggtggagccatctt

SEQ ID NO: 3012 - DNA, 44 bp, synthetic construct
  misc_feature 1..44: note = oligonucleotide decoy
  source 1..44: mol_type = other DNA
cacgtgtaaacaaacagcgatgatgtaacaggtggagccatctt

SEQ ID NO: 3013 - DNA, 44 bp, synthetic construct
  misc_feature 1..44: note = oligonucleotide decoy
  source 1..44: mol_type = other DNA
cacgtgtaaacaaacagcggtgacataacaggtggagccatctt

SEQ ID NO: 3014 - DNA, 44 bp, synthetic construct
  misc_feature 1..44: note = oligonucleotide decoy
  source 1..44: mol_type = other DNA
cacgtgtaaacaaacagcggtgacgtaacaggtggagccatctt

SEQ ID NO: 3015 - DNA, 44 bp, synthetic construct
  misc_feature 1..44: note = oligonucleotide decoy
  source 1..44: mol_type = other DNA
cacgtgtaaacaaacagcggtgatataacaggtggagccatctt

SEQ ID NO: 3016 - DNA, 44 bp, synthetic construct
  misc_feature 1..44: note = oligonucleotide decoy
  source 1..44: mol_type = other DNA
cacgtgtaaacaaacagcggtgatgtaacaggtggagccatctt

SEQ ID NO: 3017 - DNA, 44 bp, synthetic construct
  misc_feature 1..44: note = oligonucleotide decoy
  source 1..44: mol_type = other DNA
cacgtgtaaacaaacatcgatgacataacaggtggagccatctt

SEQ ID NO: 3018 - DNA, 44 bp, synthetic construct
  misc_feature 1..44: note = oligonucleotide decoy
  source 1..44: mol_type = other DNA
cacgtgtaaacaaacatcgatgacgtaacaggtggagccatctt

SEQ ID NO: 3019 - DNA, 44 bp, synthetic construct
  misc_feature 1..44: note = oligonucleotide decoy
  source 1..44: mol_type = other DNA
cacgtgtaaacaaacatcgatgatataacaggtggagccatctt

SEQ ID NO: 3020 - DNA, 44 bp, synthetic construct
  misc_feature 1..44: note = oligonucleotide decoy
  source 1..44: mol_type = other DNA
cacgtgtaaacaaacatcgatgatgtaacaggtggagccatctt

SEQ ID NO: 3021 - DNA, 44 bp, synthetic construct
  misc_feature 1..44: note = oligonucleotide decoy
  source 1..44: mol_type = other DNA
cacgtgtaaacaaacatcggtgacataacaggtggagccatctt

SEQ ID NO: 3022 - DNA, 44 bp, synthetic construct
  misc_feature 1..44: note = oligonucleotide decoy
  source 1..44: mol_type = other DNA
cacgtgtaaacaaacatcggtgacgtaacaggtggagccatctt

SEQ ID NO: 3023 - DNA, 44 bp, synthetic construct
  misc_feature 1..44: note = oligonucleotide decoy
  source 1..44: mol_type = other DNA
cacgtgtaaacaaacatcggtgatataacaggtggagccatctt

SEQ ID NO: 3024 - DNA, 44 bp, synthetic construct
  misc_feature 1..44: note = oligonucleotide decoy
  source 1..44: mol_type = other DNA
cacgtgtaaacaaacatcggtgatgtaacaggtggagccatctt

SEQ ID NO: 3025 - DNA, 44 bp, synthetic construct
  misc_feature 1..44: note = oligonucleotide decoy
  source 1..44: mol_type = other DNA
cacgtgtaaataaacaacgatgacataacaggtggagccatctt

SEQ ID NO: 3026 - DNA, 44 bp, synthetic construct
  misc_feature 1..44: note = oligonucleotide decoy
  source 1..44: mol_type = other DNA
cacgtgtaaataaacaacgatgacgtaacaggtggagccatctt

SEQ ID NO: 3027 - DNA, 44 bp, synthetic construct
  misc_feature 1..44: note = oligonucleotide decoy
  source 1..44: mol_type = other DNA
cacgtgtaaataaacaacgatgatataacaggtggagccatctt

SEQ ID NO: 3028 - DNA, 44 bp, synthetic construct
  misc_feature 1..44: note = oligonucleotide decoy
  source 1..44: mol_type = other DNA
cacgtgtaaataaacaacgatgatgtaacaggtggagccatctt

SEQ ID NO: 3029 - DNA, 44 bp, synthetic construct
  misc_feature 1..44: note = oligonucleotide decoy
  source 1..44: mol_type = other DNA
cacgtgtaaataaacaacggtgacataacaggtggagccatctt

SEQ ID NO: 3030 - DNA, 44 bp, synthetic construct
  misc_feature 1..44: note = oligonucleotide decoy
  source 1..44: mol_type = other DNA
cacgtgtaaataaacaacggtgacgtaacaggtggagccatctt

SEQ ID NO: 3031 - DNA, 44 bp, synthetic construct
  misc_feature 1..44: note = oligonucleotide decoy
  source 1..44: mol_type = other DNA
cacgtgtaaataaacaacggtgatataacaggtggagccatctt

SEQ ID NO: 3032 - DNA, 44 bp, synthetic construct
  misc_feature 1..44: note = oligonucleotide decoy
  source 1..44: mol_type = other DNA
cacgtgtaaataaacaacggtgatgtaacaggtggagccatctt

SEQ ID NO: 3033 - DNA, 44 bp, synthetic construct
  misc_feature 1..44: note = oligonucleotide decoy
  source 1..44: mol_type = other DNA
cacgtgtaaataaacaccgatgacataacaggtggagccatctt

SEQ ID NO: 3034 - DNA, 44 bp, synthetic construct
  misc_feature 1..44: note = oligonucleotide decoy
  source 1..44: mol_type = other DNA
cacgtgtaaataaacaccgatgacgtaacaggtggagccatctt

SEQ ID NO: 3035 - DNA, 44 bp, synthetic construct
  misc_feature 1..44: note = oligonucleotide decoy
  source 1..44: mol_type = other DNA
cacgtgtaaataaacaccgatgatataacaggtggagccatctt

SEQ ID NO: 3036 - DNA, 44 bp, synthetic construct
  misc_feature 1..44: note = oligonucleotide decoy
  source 1..44: mol_type = other DNA
cacgtgtaaataaacaccgatgatgtaacaggtggagccatctt

SEQ ID NO: 3037 - DNA, 44 bp, synthetic construct
  misc_feature 1..44: note = oligonucleotide decoy
  source 1..44: mol_type = other DNA
cacgtgtaaataaacaccggtgacataacaggtggagccatctt

SEQ ID NO: 3038 - DNA, 44 bp, synthetic construct
  misc_feature 1..44: note = oligonucleotide decoy
  source 1..44: mol_type = other DNA
cacgtgtaaataaacaccggtgacgtaacaggtggagccatctt

SEQ ID NO: 3039 - DNA, 44 bp, synthetic construct
  misc_feature 1..44: note = oligonucleotide decoy
  source 1..44: mol_type = other DNA
cacgtgtaaataaacaccggtgatataacaggtggagccatctt

SEQ ID NO: 3040 - DNA, 44 bp, synthetic construct
  misc_feature 1..44: note = oligonucleotide decoy
  source 1..44: mol_type = other DNA
cacgtgtaaataaacaccggtgatgtaacaggtggagccatctt

SEQ ID NO: 3041 - DNA, 44 bp, synthetic construct
  misc_feature 1..44: note = oligonucleotide decoy
  source 1..44: mol_type = other DNA
cacgtgtaaataaacagcgatgacataacaggtggagccatctt

SEQ ID NO: 3042 - DNA, 44 bp, synthetic construct
  misc_feature 1..44: note = oligonucleotide decoy
  source 1..44: mol_type = other DNA
cacgtgtaaataaacagcgatgacgtaacaggtggagccatctt

SEQ ID NO: 3043 - DNA, 44 bp, synthetic construct
  misc_feature 1..44: note = oligonucleotide decoy
  source 1..44: mol_type = other DNA
cacgtgtaaataaacagcgatgatataacaggtggagccatctt

SEQ ID NO: 3044 - DNA, 44 bp, synthetic construct
  misc_feature 1..44: note = oligonucleotide decoy
  source 1..44: mol_type = other DNA
cacgtgtaaataaacagcgatgatgtaacaggtggagccatctt

SEQ ID NO: 3045 - DNA, 44 bp, synthetic construct
  misc_feature 1..44: note = oligonucleotide decoy
  source 1..44: mol_type = other DNA
cacgtgtaaataaacagcggtgacataacaggtggagccatctt

SEQ ID NO: 3046 - DNA, 44 bp, synthetic construct
  misc_feature 1..44: note = oligonucleotide decoy
  source 1..44: mol_type = other DNA
cacgtgtaaataaacagcggtgacgtaacaggtggagccatctt

SEQ ID NO: 3047 - DNA, 44 bp, synthetic construct
  misc_feature 1..44: note = oligonucleotide decoy
  source 1..44: mol_type = other DNA
cacgtgtaaataaacagcggtgatataacaggtggagccatctt

SEQ ID NO: 3048 - DNA, 44 bp, synthetic construct
  misc_feature 1..44: note = oligonucleotide decoy
  source 1..44: mol_type = other DNA
cacgtgtaaataaacagcggtgatgtaacaggtggagccatctt

SEQ ID NO: 3049 - DNA, 44 bp, synthetic construct
  misc_feature 1..44: note = oligonucleotide decoy
  source 1..44: mol_type = other DNA
cacgtgtaaataaacatcgatgacataacaggtggagccatctt

SEQ ID NO: 3050 - DNA, 44 bp, synthetic construct
  misc_feature 1..44: note = oligonucleotide decoy
  source 1..44: mol_type = other DNA
cacgtgtaaataaacatcgatgacgtaacaggtggagccatctt

SEQ ID NO: 3051 - DNA, 44 bp, synthetic construct
  misc_feature 1..44: note = oligonucleotide decoy
  source 1..44: mol_type = other DNA
cacgtgtaaataaacatcgatgatataacaggtggagccatctt

SEQ ID NO: 3052 - DNA, 44 bp, synthetic construct
  misc_feature 1..44: note = oligonucleotide decoy
  source 1..44: mol_type = other DNA
cacgtgtaaataaacatcgatgatgtaacaggtggagccatctt

SEQ ID NO: 3053 - DNA, 44 bp, synthetic construct
  misc_feature 1..44: note = oligonucleotide decoy
  source 1..44: mol_type = other DNA
cacgtgtaaataaacatcggtgacataacaggtggagccatctt

SEQ ID NO: 3054 - DNA, 44 bp, synthetic construct
  misc_feature 1..44: note = oligonucleotide decoy
  source 1..44: mol_type = other DNA
cacgtgtaaataaacatcggtgacgtaacaggtggagccatctt

SEQ ID NO: 3055 - DNA, 44 bp, synthetic construct
  misc_feature 1..44: note = oligonucleotide decoy
  source 1..44: mol_type = other DNA
cacgtgtaaataaacatcggtgatataacaggtggagccatctt

SEQ ID NO: 3056 - DNA, 44 bp, synthetic construct
  misc_feature 1..44: note = oligonucleotide decoy
  source 1..44: mol_type = other DNA
cacgtgtaaataaacatcggtgatgtaacaggtggagccatctt

SEQ ID NO: 3057 - DNA, 44 bp, synthetic construct
  misc_feature 1..44: note = oligonucleotide decoy
  source 1..44: mol_type = other DNA
cacgtgtaaacaaacaacgatgacataacaggtggagccatttt

SEQ ID NO: 3058 - DNA, 44 bp, synthetic construct
  misc_feature 1..44: note = oligonucleotide decoy
  source 1..44: mol_type = other DNA
cacgtgtaaacaaacaacgatgacgtaacaggtggagccatttt

SEQ ID NO: 3059 - DNA, 44 bp, synthetic construct
  misc_feature 1..44: note = oligonucleotide decoy
  source 1..44: mol_type = other DNA
cacgtgtaaacaaacaacgatgatataacaggtggagccatttt

SEQ ID NO: 3060 - DNA, 44 bp, synthetic construct
  misc_feature 1..44: note = oligonucleotide decoy
  source 1..44: mol_type = other DNA
cacgtgtaaacaaacaacgatgatgtaacaggtggagccatttt

SEQ ID NO: 3061 - DNA, 44 bp, synthetic construct
  misc_feature 1..44: note = oligonucleotide decoy
  source 1..44: mol_type = other DNA
cacgtgtaaacaaacaacggtgacataacaggtggagccatttt

SEQ ID NO: 3062 - DNA, 44 bp, synthetic construct
  misc_feature 1..44: note = oligonucleotide decoy
  source 1..44: mol_type = other DNA
cacgtgtaaacaaacaacggtgacgtaacaggtggagccatttt

SEQ ID NO: 3063 - DNA, 44 bp, synthetic construct
  misc_feature 1..44: note = oligonucleotide decoy
  source 1..44: mol_type = other DNA
cacgtgtaaacaaacaacggtgatataacaggtggagccatttt

SEQ ID NO: 3064 - DNA, 44 bp, synthetic construct
  misc_feature 1..44: note = oligonucleotide decoy
  source 1..44: mol_type = other DNA
cacgtgtaaacaaacaacggtgatgtaacaggtggagccatttt

SEQ ID NO: 3065 - DNA, 44 bp, synthetic construct
  misc_feature 1..44: note = oligonucleotide decoy
  source 1..44: mol_type = other DNA
cacgtgtaaacaaacaccgatgacataacaggtggagccatttt

SEQ ID NO: 3066 - DNA, 44 bp, synthetic construct
  misc_feature 1..44: note = oligonucleotide decoy
  source 1..44: mol_type = other DNA
cacgtgtaaacaaacaccgatgacgtaacaggtggagccatttt

SEQ ID NO: 3067 - DNA, 44 bp, synthetic construct
  misc_feature 1..44: note = oligonucleotide decoy
  source 1..44: mol_type = other DNA
cacgtgtaaacaaacaccgatgatataacaggtggagccatttt

SEQ ID NO: 3068 - DNA, 44 bp, synthetic construct
  misc_feature 1..44: note = oligonucleotide decoy
  source 1..44: mol_type = other DNA
cacgtgtaaacaaacaccgatgatgtaacaggtggagccatttt

SEQ ID NO: 3069 - DNA, 44 bp, synthetic construct
  misc_feature 1..44: note = oligonucleotide decoy
  source 1..44: mol_type = other DNA
cacgtgtaaacaaacaccggtgacataacaggtggagccatttt

SEQ ID NO: 3070 - DNA, 44 bp, synthetic construct
  misc_feature 1..44: note = oligonucleotide decoy
  source 1..44: mol_type = other DNA
cacgtgtaaacaaacaccggtgacgtaacaggtggagccatttt

SEQ ID NO: 3071 - DNA, 44 bp, synthetic construct
  misc_feature 1..44: note = oligonucleotide decoy
  source 1..44: mol_type = other DNA
cacgtgtaaacaaacaccggtgatataacaggtggagccatttt

SEQ ID NO: 3072 - DNA, 44 bp, synthetic construct
  misc_feature 1..44: note = oligonucleotide decoy
  source 1..44: mol_type = other DNA
cacgtgtaaacaaacaccggtgatgtaacaggtggagccatttt

SEQ ID NO: 3073 - DNA, 44 bp, synthetic construct
  misc_feature 1..44: note = oligonucleotide decoy
  source 1..44: mol_type = other DNA
cacgtgtaaacaaacagcgatgacataacaggtggagccatttt

SEQ ID NO: 3074 - DNA, 44 bp, synthetic construct
  misc_feature 1..44: note = oligonucleotide decoy
  source 1..44: mol_type = other DNA
cacgtgtaaacaaacagcgatgacgtaacaggtggagccatttt

SEQ ID NO: 3075 - DNA, 44 bp, synthetic construct
  misc_feature 1..44: note = oligonucleotide decoy
  source 1..44: mol_type = other DNA
cacgtgtaaacaaacagcgatgatataacaggtggagccatttt

SEQ ID NO: 3076 - DNA, 44 bp, synthetic construct
  misc_feature 1..44: note = oligonucleotide decoy
  source 1..44: mol_type = other DNA
cacgtgtaaacaaacagcgatgatgtaacaggtggagccatttt

SEQ ID NO: 3077 - DNA, 44 bp, synthetic construct
  misc_feature 1..44: note = oligonucleotide decoy
  source 1..44: mol_type = other DNA
cacgtgtaaacaaacagcggtgacataacaggtggagccatttt

SEQ ID NO: 3078 - DNA, 44 bp, synthetic construct
  misc_feature 1..44: note = oligonucleotide decoy
  source 1..44: mol_type = other DNA
cacgtgtaaacaaacagcggtgacgtaacaggtggagccatttt

SEQ ID NO: 3079 - DNA, 44 bp, synthetic construct
  misc_feature 1..44: note = oligonucleotide decoy
  source 1..44: mol_type = other DNA
cacgtgtaaacaaacagcggtgatataacaggtggagccatttt

SEQ ID NO: 3080 - DNA, 44 bp, synthetic construct
  misc_feature 1..44: note = oligonucleotide decoy
  source 1..44: mol_type = other DNA
cacgtgtaaacaaacagcggtgatgtaacaggtggagccatttt

SEQ ID NO: 3081 - DNA, 44 bp, synthetic construct
  misc_feature 1..44: note = oligonucleotide decoy
  source 1..44: mol_type = other DNA
cacgtgtaaacaaacatcgatgacataacaggtggagccatttt

SEQ ID NO: 3082 - DNA, 44 bp, synthetic construct
  misc_feature 1..44: note = oligonucleotide decoy
  source 1..44: mol_type = other DNA
cacgtgtaaacaaacatcgatgacgtaacaggtggagccatttt

SEQ ID NO: 3083 - DNA, 44 bp, synthetic construct
  misc_feature 1..44: note = oligonucleotide decoy
  source 1..44: mol_type = other DNA
cacgtgtaaacaaacatcgatgatataacaggtggagccatttt

SEQ ID NO: 3084 - DNA, 44 bp, synthetic construct
  misc_feature 1..44: note = oligonucleotide decoy
  source 1..44: mol_type = other DNA
cacgtgtaaacaaacatcgatgatgtaacaggtggagccatttt

SEQ ID NO: 3085 - DNA, 44 bp, synthetic construct
  misc_feature 1..44: note = oligonucleotide decoy
  source 1..44: mol_type = other DNA
cacgtgtaaacaaacatcggtgacataacaggtggagccatttt

SEQ ID NO: 3086 - DNA, 44 bp, synthetic construct
  misc_feature 1..44: note = oligonucleotide decoy
  source 1..44: mol_type = other DNA
cacgtgtaaacaaacatcggtgacgtaacaggtggagccatttt

SEQ ID NO: 3087 - DNA, 44 bp, synthetic construct
  misc_feature 1..44: note = oligonucleotide decoy
  source 1..44: mol_type = other DNA
cacgtgtaaacaaacatcggtgatataacaggtggagccatttt

SEQ ID NO: 3088 - DNA, 44 bp, synthetic construct
  misc_feature 1..44: note = oligonucleotide decoy
  source 1..44: mol_type = other DNA
cacgtgtaaacaaacatcggtgatgtaacaggtggagccatttt

SEQ ID NO: 3089 - DNA, 44 bp, synthetic construct
  misc_feature 1..44: note = oligonucleotide decoy
  source 1..44: mol_type = other DNA
cacgtgtaaataaacaacgatgacataacaggtggagccatttt

SEQ ID NO: 3090 - DNA, 44 bp, synthetic construct
  misc_feature 1..44: note = oligonucleotide decoy
  source 1..44: mol_type = other DNA
cacgtgtaaataaacaacgatgacgtaacaggtggagccatttt

SEQ ID NO: 3091 - DNA, 44 bp, synthetic construct
  misc_feature 1..44: note = oligonucleotide decoy
  source 1..44: mol_type = other DNA
cacgtgtaaataaacaacgatgatataacaggtggagccatttt

SEQ ID NO: 3092 - DNA, 44 bp, synthetic construct
  misc_feature 1..44: note = oligonucleotide decoy
  source 1..44: mol_type = other DNA
cacgtgtaaataaacaacgatgatgtaacaggtggagccatttt

SEQ ID NO: 3093 - DNA, 44 bp, synthetic construct
  misc_feature 1..44: note = oligonucleotide decoy
  source 1..44: mol_type = other DNA
cacgtgtaaataaacaacggtgacataacaggtggagccatttt

SEQ ID NO: 3094 - DNA, 44 bp, synthetic construct
  misc_feature 1..44: note = oligonucleotide decoy
  source 1..44: mol_type = other DNA
cacgtgtaaataaacaacggtgacgtaacaggtggagccatttt

SEQ ID NO: 3095 - DNA, 44 bp, synthetic construct
  misc_feature 1..44: note = oligonucleotide decoy
  source 1..44: mol_type = other DNA
cacgtgtaaataaacaacggtgatataacaggtggagccatttt

SEQ ID NO: 3096 - DNA, 44 bp, synthetic construct
  misc_feature 1..44: note = oligonucleotide decoy
  source 1..44: mol_type = other DNA
cacgtgtaaataaacaacggtgatgtaacaggtggagccatttt

SEQ ID NO: 3097 - DNA, 44 bp, synthetic construct
  misc_feature 1..44: note = oligonucleotide decoy
  source 1..44: mol_type = other DNA
cacgtgtaaataaacaccgatgacataacaggtggagccatttt

SEQ ID NO: 3098 - DNA, 44 bp, synthetic construct
  misc_feature 1..44: note = oligonucleotide decoy
  source 1..44: mol_type = other DNA
cacgtgtaaataaacaccgatgacgtaacaggtggagccatttt

SEQ ID NO: 3099 - DNA, 44 bp, synthetic construct
  misc_feature 1..44: note = oligonucleotide decoy
  source 1..44: mol_type = other DNA
cacgtgtaaataaacaccgatgatataacaggtggagccatttt

SEQ ID NO: 3100 - DNA, 44 bp, synthetic construct
  misc_feature 1..44: note = oligonucleotide decoy
  source 1..44: mol_type = other DNA
cacgtgtaaataaacaccgatgatgtaacaggtggagccatttt

SEQ ID NO: 3101 - DNA, 44 bp, synthetic construct
  misc_feature 1..44: note = oligonucleotide decoy
  source 1..44: mol_type = other DNA
cacgtgtaaataaacaccggtgacataacaggtggagccatttt

SEQ ID NO: 3102 - DNA, 44 bp, synthetic construct
  misc_feature 1..44: note = oligonucleotide decoy
  source 1..44: mol_type = other DNA
cacgtgtaaataaacaccggtgacgtaacaggtggagccatttt

SEQ ID NO: 3103 - DNA, 44 bp, synthetic construct
  misc_feature 1..44: note = oligonucleotide decoy
  source 1..44: mol_type = other DNA
cacgtgtaaataaacaccggtgatataacaggtggagccatttt

SEQ ID NO: 3104 - DNA, 44 bp, synthetic construct
  misc_feature 1..44: note = oligonucleotide decoy
  source 1..44: mol_type = other DNA
cacgtgtaaataaacaccggtgatgtaacaggtggagccatttt

SEQ ID NO: 3105 - DNA, 44 bp, synthetic construct
  misc_feature 1..44: note = oligonucleotide decoy
  source 1..44: mol_type = other DNA
cacgtgtaaataaacagcgatgacataacaggtggagccatttt

SEQ ID NO: 3106 - DNA, 44 bp, synthetic construct
  misc_feature 1..44: note = oligonucleotide decoy
  source 1..44: mol_type = other DNA
cacgtgtaaataaacagcgatgacgtaacaggtggagccatttt

SEQ ID NO: 3107 - DNA, 44 bp, synthetic construct
  misc_feature 1..44: note = oligonucleotide decoy
  source 1..44: mol_type = other DNA
cacgtgtaaataaacagcgatgatataacaggtggagccatttt

SEQ ID NO: 3108 - DNA, 44 bp, synthetic construct
  misc_feature 1..44: note = oligonucleotide decoy
  source 1..44: mol_type = other DNA
cacgtgtaaataaacagcgatgatgtaacaggtggagccatttt

SEQ ID NO: 3109 - DNA, 44 bp, synthetic construct
  misc_feature 1..44: note = oligonucleotide decoy
  source 1..44: mol_type = other DNA
cacgtgtaaataaacagcggtgacataacaggtggagccatttt

SEQ ID NO: 3110 - DNA, 44 bp, synthetic construct
  misc_feature 1..44: note = oligonucleotide decoy
  source 1..44: mol_type = other DNA
cacgtgtaaataaacagcggtgacgtaacaggtggagccatttt

SEQ ID NO: 3111 - DNA, 44 bp, synthetic construct
  misc_feature 1..44: note = oligonucleotide decoy
  source 1..44: mol_type = other DNA
cacgtgtaaataaacagcggtgatataacaggtggagccatttt

SEQ ID NO: 3112 - DNA, 44 bp, synthetic construct
  misc_feature 1..44: note = oligonucleotide decoy
  source 1..44: mol_type = other DNA
cacgtgtaaataaacagcggtgatgtaacaggtggagccatttt

SEQ ID NO: 3113 - DNA, 44 bp, synthetic construct
  misc_feature 1..44: note = oligonucleotide decoy
  source 1..44: mol_type = other DNA
cacgtgtaaataaacatcgatgacataacaggtggagccatttt

SEQ ID NO: 3114 - DNA, 44 bp, synthetic construct
  misc_feature 1..44: note = oligonucleotide decoy
  source 1..44: mol_type = other DNA
cacgtgtaaataaacatcgatgacgtaacaggtggagccatttt

SEQ ID NO: 3115 - DNA, 44 bp, synthetic construct
  misc_feature 1..44: note = oligonucleotide decoy
  source 1..44: mol_type = other DNA
cacgtgtaaataaacatcgatgatataacaggtggagccatttt

SEQ ID NO: 3116 - DNA, 44 bp, synthetic construct
  misc_feature 1..44: note = oligonucleotide decoy
  source 1..44: mol_type = other DNA
cacgtgtaaataaacatcgatgatgtaacaggtggagccatttt

SEQ ID NO: 3117 - DNA, 44 bp, synthetic construct
  misc_feature 1..44: note = oligonucleotide decoy
  source 1..44: mol_type = other DNA
cacgtgtaaataaacatcggtgacataacaggtggagccatttt

SEQ ID NO: 3118 - DNA, 44 bp, synthetic construct
  misc_feature 1..44: note = oligonucleotide decoy
  source 1..44: mol_type = other DNA
cacgtgtaaataaacatcggtgacgtaacaggtggagccatttt

SEQ ID NO: 3119 - DNA, 44 bp, synthetic construct
  misc_feature 1..44: note = oligonucleotide decoy
  source 1..44: mol_type = other DNA
cacgtgtaaataaacatcggtgatataacaggtggagccatttt

SEQ ID NO: 3120 - DNA, 44 bp, synthetic construct
  misc_feature 1..44: note = oligonucleotide decoy
  source 1..44: mol_type = other DNA
cacgtgtaaataaacatcggtgatgtaacaggtggagccatttt

SEQ ID NO: 3121 - DNA, 44 bp, synthetic construct
  misc_feature 1..44: note = oligonucleotide decoy
  source 1..44: mol_type = other DNA
caacgatgtttatttacacgtgacataacaggtggagccatctt

SEQ ID NO: 3122 - DNA, 44 bp, synthetic construct
  misc_feature 1..44: note = oligonucleotide decoy
  source 1..44: mol_type = other DNA
caacgatgtttatttacacgtgacgtaacaggtggagccatctt

SEQ ID NO: 3123 - DNA, 44 bp, synthetic construct
  misc_feature 1..44: note = oligonucleotide decoy
  source 1..44: mol_type = other DNA
caacgatgtttatttacacgtgatataacaggtggagccatctt

SEQ ID NO: 3124 - DNA, 44 bp, synthetic construct
  misc_feature 1..44: note = oligonucleotide decoy
  source 1..44: mol_type = other DNA
caacgatgtttatttacacgtgatgtaacaggtggagccatctt

SEQ ID NO: 3125 - DNA, 44 bp, synthetic construct
  misc_feature 1..44: note = oligonucleotide decoy
  source 1..44: mol_type = other DNA
caacgatgtttgtttacacgtgacataacaggtggagccatctt

SEQ ID NO: 3126 - DNA, 44 bp, synthetic construct
  misc_feature 1..44: note = oligonucleotide decoy
  source 1..44: mol_type = other DNA
caacgatgtttgtttacacgtgacgtaacaggtggagccatctt

SEQ ID NO: 3127 - DNA, 44 bp, synthetic construct
  misc_feature 1..44: note = oligonucleotide decoy
  source 1..44: mol_type = other DNA
caacgatgtttgtttacacgtgatataacaggtggagccatctt

SEQ ID NO: 3128 - DNA, 44 bp, synthetic construct
  misc_feature 1..44: note = oligonucleotide decoy
  source 1..44: mol_type = other DNA
caacgatgtttgtttacacgtgatgtaacaggtggagccatctt

SEQ ID NO: 3129 - DNA, 44 bp, synthetic construct
  misc_feature 1..44: note = oligonucleotide decoy
  source 1..44: mol_type = other DNA
caacgctgtttatttacacgtgacataacaggtggagccatctt

SEQ ID NO: 3130 - DNA, 44 bp, synthetic construct
  misc_feature 1..44: note = oligonucleotide decoy
  source 1..44: mol_type = other DNA
caacgctgtttatttacacgtgacgtaacaggtggagccatctt

SEQ ID NO: 3131 - DNA, 44 bp, synthetic construct
  misc_feature 1..44: note = oligonucleotide decoy
  source 1..44: mol_type = other DNA
caacgctgtttatttacacgtgatataacaggtggagccatctt

SEQ ID NO: 3132 - DNA, 44 bp, synthetic construct
  misc_feature 1..44: note = oligonucleotide decoy
  source 1..44: mol_type = other DNA
caacgctgtttatttacacgtgatgtaacaggtggagccatctt

SEQ ID NO: 3133 - DNA, 44 bp, synthetic construct
  misc_feature 1..44: note = oligonucleotide decoy
  source 1..44: mol_type = other DNA
caacgctgtttgtttacacgtgacataacaggtggagccatctt

SEQ ID NO: 3134 - DNA, 44 bp, synthetic construct
  misc_feature 1..44: note = oligonucleotide decoy
  source 1..44: mol_type = other DNA
caacgctgtttgtttacacgtgacgtaacaggtggagccatctt

SEQ ID NO: 3135 - DNA, 44 bp, synthetic construct
  misc_feature 1..44: note = oligonucleotide decoy
  source 1..44: mol_type = other DNA
caacgctgtttgtttacacgtgatataacaggtggagccatctt

SEQ ID NO: 3136 - DNA, 44 bp, synthetic construct
  misc_feature 1..44: note = oligonucleotide decoy
  source 1..44: mol_type = other DNA
caacgctgtttgtttacacgtgatgtaacaggtggagccatctt

SEQ ID NO: 3137 - DNA, 44 bp, synthetic construct
  misc_feature 1..44: note = oligonucleotide decoy
  source 1..44: mol_type = other DNA
caacggtgtttatttacacgtgacataacaggtggagccatctt

SEQ ID NO: 3138 - DNA, 44 bp, synthetic construct
  misc_feature 1..44: note = oligonucleotide decoy
  source 1..44: mol_type = other DNA
caacggtgtttatttacacgtgacgtaacaggtggagccatctt

SEQ ID NO: 3139 - DNA, 44 bp, synthetic construct
  misc_feature 1..44: note = oligonucleotide decoy
  source 1..44: mol_type = other DNA
caacggtgtttatttacacgtgatataacaggtggagccatctt

SEQ ID NO: 3140 - DNA, 44 bp, synthetic construct
  misc_feature 1..44: note = oligonucleotide decoy
  source 1..44: mol_type = other DNA
caacggtgtttatttacacgtgatgtaacaggtggagccatctt

SEQ ID NO: 3141 - DNA, 44 bp, synthetic construct
  misc_feature 1..44: note = oligonucleotide decoy
  source 1..44: mol_type = other DNA
caacggtgtttgtttacacgtgacataacaggtggagccatctt

SEQ ID NO: 3142 - DNA, 44 bp, synthetic construct
  misc_feature 1..44: note = oligonucleotide decoy
  source 1..44: mol_type = other DNA
caacggtgtttgtttacacgtgacgtaacaggtggagccatctt

SEQ ID NO: 3143 - DNA, 44 bp, synthetic construct
  misc_feature 1..44: note = oligonucleotide decoy
  source 1..44: mol_type = other DNA
caacggtgtttgtttacacgtgatataacaggtggagccatctt

SEQ ID NO: 3144 - DNA, 44 bp, synthetic construct
  misc_feature 1..44: note = oligonucleotide decoy
  source 1..44: mol_type = other DNA
caacggtgtttgtttacacgtgatgtaacaggtggagccatctt

SEQ ID NO: 3145 - DNA, 44 bp, synthetic construct
  misc_feature 1..44: note = oligonucleotide decoy
  source 1..44: mol_type = other DNA
caacgttgtttatttacacgtgacataacaggtggagccatctt

SEQ ID NO: 3146 - DNA, 44 bp, synthetic construct
  misc_feature 1..44: note = oligonucleotide decoy
  source 1..44: mol_type = other DNA
caacgttgtttatttacacgtgacgtaacaggtggagccatctt

SEQ ID NO: 3147 - DNA, 44 bp, synthetic construct
  misc_feature 1..44: note = oligonucleotide decoy
  source 1..44: mol_type = other DNA
caacgttgtttatttacacgtgatataacaggtggagccatctt

SEQ ID NO: 3148 - DNA, 44 bp, synthetic construct
  misc_feature 1..44: note = oligonucleotide decoy
  source 1..44: mol_type = other DNA
caacgttgtttatttacacgtgatgtaacaggtggagccatctt

SEQ ID NO: 3149 - DNA, 44 bp, synthetic construct
  misc_feature 1..44: note = oligonucleotide decoy
  source 1..44: mol_type = other DNA
caacgttgtttgtttacacgtgacataacaggtggagccatctt

SEQ ID NO: 3150 - DNA, 44 bp, synthetic construct
  misc_feature 1..44: note = oligonucleotide decoy
  source 1..44: mol_type = other DNA
caacgttgtttgtttacacgtgacgtaacaggtggagccatctt

SEQ ID NO: 3151 - DNA, 44 bp, synthetic construct
  misc_feature 1..44: note = oligonucleotide decoy
  source 1..44: mol_type = other DNA
caacgttgtttgtttacacgtgatataacaggtggagccatctt

SEQ ID NO: 3152 - DNA, 44 bp, synthetic construct
  misc_feature 1..44: note = oligonucleotide decoy
  source 1..44: mol_type = other DNA
caacgttgtttgtttacacgtgatgtaacaggtggagccatctt

SEQ ID NO: 3153 - DNA, 44 bp, synthetic construct
  misc_feature 1..44: note = oligonucleotide decoy
  source 1..44: mol_type = other DNA
caccgatgtttatttacacgtgacataacaggtggagccatctt

SEQ ID NO: 3154 - DNA, 44 bp, synthetic construct
  misc_feature 1..44: note = oligonucleotide decoy
  source 1..44: mol_type = other DNA
caccgatgtttatttacacgtgacgtaacaggtggagccatctt

SEQ ID NO: 3155 - DNA, 44 bp, synthetic construct
  misc_feature 1..44: note = oligonucleotide decoy
  source 1..44: mol_type = other DNA
caccgatgtttatttacacgtgatataacaggtggagccatctt

SEQ ID NO: 3156 - DNA, 44 bp, synthetic construct
  misc_feature 1..44: note = oligonucleotide decoy
  source 1..44: mol_type = other DNA
caccgatgtttatttacacgtgatgtaacaggtggagccatctt

SEQ ID NO: 3157 - DNA, 44 bp, synthetic construct
  misc_feature 1..44: note = oligonucleotide decoy
  source 1..44: mol_type = other DNA
caccgatgtttgtttacacgtgacataacaggtggagccatctt

SEQ ID NO: 3158 - DNA, 44 bp, synthetic construct
  misc_feature 1..44: note = oligonucleotide decoy
  source 1..44: mol_type = other DNA
caccgatgtttgtttacacgtgacgtaacaggtggagccatctt

SEQ ID NO: 3159 - DNA, 44 bp, synthetic construct
  misc_feature 1..44: note = oligonucleotide decoy
  source 1..44: mol_type = other DNA
caccgatgtttgtttacacgtgatataacaggtggagccatctt

SEQ ID NO: 3160 - DNA, 44 bp, synthetic construct
  misc_feature 1..44: note = oligonucleotide decoy
  source 1..44: mol_type = other DNA
caccgatgtttgtttacacgtgatgtaacaggtggagccatctt

SEQ ID NO: 3161 - DNA, 44 bp, synthetic construct
  misc_feature 1..44: note = oligonucleotide decoy
  source 1..44: mol_type = other DNA
caccgctgtttatttacacgtgacataacaggtggagccatctt

SEQ ID NO: 3162 - DNA, 44 bp, synthetic construct
  misc_feature 1..44: note = oligonucleotide decoy
  source 1..44: mol_type = other DNA
caccgctgtttatttacacgtgacgtaacaggtggagccatctt

SEQ ID NO: 3163 - DNA, 44 bp, synthetic construct
  misc_feature 1..44: note = oligonucleotide decoy
  source 1..44: mol_type = other DNA
caccgctgtttatttacacgtgatataacaggtggagccatctt

SEQ ID NO: 3164 - DNA, 44 bp, synthetic construct
  misc_feature 1..44: note = oligonucleotide decoy
  source 1..44: mol_type = other DNA
caccgctgtttatttacacgtgatgtaacaggtggagccatctt

SEQ ID NO: 3165 - DNA, 44 bp, synthetic construct
  misc_feature 1..44: note = oligonucleotide decoy
  source 1..44: mol_type = other DNA
caccgctgtttgtttacacgtgacataacaggtggagccatctt

SEQ ID NO: 3166 - DNA, 44 bp, synthetic construct
  misc_feature 1..44: note = oligonucleotide decoy
  source 1..44: mol_type = other DNA
caccgctgtttgtttacacgtgacgtaacaggtggagccatctt

SEQ ID NO: 3167 - DNA, 44 bp, synthetic construct
  misc_feature 1..44: note = oligonucleotide decoy
  source 1..44: mol_type = other DNA
caccgctgtttgtttacacgtgatataacaggtggagccatctt

SEQ ID NO: 3168 - DNA, 44 bp, synthetic construct
  misc_feature 1..44: note = oligonucleotide decoy
  source 1..44: mol_type = other DNA
caccgctgtttgtttacacgtgatgtaacaggtggagccatctt

SEQ ID NO: 3169 - DNA, 44 bp, synthetic construct
  misc_feature 1..44: note = oligonucleotide decoy
  source 1..44: mol_type = other DNA
caccggtgtttatttacacgtgacataacaggtggagccatctt

SEQ ID NO: 3170 - DNA, 44 bp, synthetic construct
  misc_feature 1..44: note = oligonucleotide decoy
  source 1..44: mol_type = other DNA
caccggtgtttatttacacgtgacgtaacaggtggagccatctt

SEQ ID NO: 3171 - DNA, 44 bp, synthetic construct
  misc_feature 1..44: note = oligonucleotide decoy
  source 1..44: mol_type = other DNA
caccggtgtttatttacacgtgatataacaggtggagccatctt

SEQ ID NO: 3172 - DNA, 44 bp, synthetic construct
  misc_feature 1..44: note = oligonucleotide decoy
  source 1..44: mol_type = other DNA
caccggtgtttatttacacgtgatgtaacaggtggagccatctt

SEQ ID NO: 3173 - DNA, 44 bp, synthetic construct
  misc_feature 1..44: note = oligonucleotide decoy
  source 1..44: mol_type = other DNA
caccggtgtttgtttacacgtgacataacaggtggagccatctt

SEQ ID NO: 3174 - DNA, 44 bp, synthetic construct
  misc_feature 1..44: note = oligonucleotide decoy
  source 1..44: mol_type = other DNA
caccggtgtttgtttacacgtgacgtaacaggtggagccatctt

SEQ ID NO: 3175 - DNA, 44 bp, synthetic construct
  misc_feature 1..44: note = oligonucleotide decoy
  source 1..44: mol_type = other DNA
caccggtgtttgtttacacgtgatataacaggtggagccatctt

SEQ ID NO: 3176 - DNA, 44 bp, synthetic construct
  misc_feature 1..44: note = oligonucleotide decoy
  source 1..44: mol_type = other DNA
caccggtgtttgtttacacgtgatgtaacaggtggagccatctt

SEQ ID NO: 3177 - DNA, 44 bp, synthetic construct
  misc_feature 1..44: note = oligonucleotide decoy
  source 1..44: mol_type = other DNA
caccgttgtttatttacacgtgacataacaggtggagccatctt

SEQ ID NO: 3178 - DNA, 44 bp, synthetic construct
  misc_feature 1..44: note = oligonucleotide decoy
  source 1..44: mol_type = other DNA
caccgttgtttatttacacgtgacgtaacaggtggagccatctt

SEQ ID NO: 3179 - DNA, 44 bp, synthetic construct
  misc_feature 1..44: note = oligonucleotide decoy
  source 1..44: mol_type = other DNA
caccgttgtttatttacacgtgatataacaggtggagccatctt

SEQ ID NO: 3180 - DNA, 44 bp, synthetic construct
  misc_feature 1..44: note = oligonucleotide decoy
  source 1..44: mol_type = other DNA
caccgttgtttatttacacgtgatgtaacaggtggagccatctt

SEQ ID NO: 3181 - DNA, 44 bp, synthetic construct
  misc_feature 1..44: note = oligonucleotide decoy
  source 1..44: mol_type = other DNA
caccgttgtttgtttacacgtgacataacaggtggagccatctt

SEQ ID NO: 3182 - DNA, 44 bp, synthetic construct
  misc_feature 1..44: note = oligonucleotide decoy
  source 1..44: mol_type = other DNA
caccgttgtttgtttacacgtgacgtaacaggtggagccatctt

SEQ ID NO: 3183 - DNA, 44 bp, synthetic construct
  misc_feature 1..44: note = oligonucleotide decoy
  source 1..44: mol_type = other DNA
caccgttgtttgtttacacgtgatataacaggtggagccatctt

SEQ ID NO: 3184 - DNA, 44 bp, synthetic construct
  misc_feature 1..44: note = oligonucleotide decoy
  source 1..44: mol_type = other DNA
caccgttgtttgtttacacgtgatgtaacaggtggagccatctt

SEQ ID NO: 3185 - DNA, 44 bp, synthetic construct
  misc_feature 1..44: note = oligonucleotide decoy
  source 1..44: mol_type = other DNA
cagcgatgtttatttacacgtgacataacaggtggagccatctt

SEQ ID NO: 3186 - DNA, 44 bp, synthetic construct
  misc_feature 1..44: note = oligonucleotide decoy
  source 1..44: mol_type = other DNA
cagcgatgtttatttacacgtgacgtaacaggtggagccatctt

SEQ ID NO: 3187 - DNA, 44 bp, synthetic construct
  misc_feature 1..44: note = oligonucleotide decoy
  source 1..44: mol_type = other DNA
cagcgatgtttatttacacgtgatataacaggtggagccatctt

SEQ ID NO: 3188 - DNA, 44 bp, synthetic construct
  misc_feature 1..44: note = oligonucleotide decoy
  source 1..44: mol_type = other DNA
cagcgatgtttatttacacgtgatgtaacaggtggagccatctt

SEQ ID NO: 3189 - DNA, 44 bp, synthetic construct
  misc_feature 1..44: note = oligonucleotide decoy
  source 1..44: mol_type = other DNA
cagcgatgtttgtttacacgtgacataacaggtggagccatctt

SEQ ID NO: 3190 - DNA, 44 bp, synthetic construct
  misc_feature 1..44: note = oligonucleotide decoy
  source 1..44: mol_type = other DNA
cagcgatgtttgtttacacgtgacgtaacaggtggagccatctt

SEQ ID NO: 3191 - DNA, 44 bp, synthetic construct
  misc_feature 1..44: note = oligonucleotide decoy
  source 1..44: mol_type = other DNA
cagcgatgtttgtttacacgtgatataacaggtggagccatctt

SEQ ID NO: 3192 - DNA, 44 bp, synthetic construct
  misc_feature 1..44: note = oligonucleotide decoy
  source 1..44: mol_type = other DNA
cagcgatgtttgtttacacgtgatgtaacaggtggagccatctt

SEQ ID NO: 3193 - DNA, 44 bp, synthetic construct
  misc_feature 1..44: note = oligonucleotide decoy
  source 1..44: mol_type = other DNA
cagcgctgtttatttacacgtgacataacaggtggagccatctt

SEQ ID NO: 3194 - DNA, 44 bp, synthetic construct
  misc_feature 1..44: note = oligonucleotide decoy
  source 1..44: mol_type = other DNA
cagcgctgtttatttacacgtgacgtaacaggtggagccatctt

SEQ ID NO: 3195 - DNA, 44 bp, synthetic construct
  misc_feature 1..44: note = oligonucleotide decoy
  source 1..44: mol_type = other DNA
cagcgctgtttatttacacgtgatataacaggtggagccatctt

SEQ ID NO: 3196 - DNA, 44 bp, synthetic construct
  misc_feature 1..44: note = oligonucleotide decoy
  source 1..44: mol_type = other DNA
cagcgctgtttatttacacgtgatgtaacaggtggagccatctt

SEQ ID NO: 3197 - DNA, 44 bp, synthetic construct
  misc_feature 1..44: note = oligonucleotide decoy
  source 1..44: mol_type = other DNA
cagcgctgtttgtttacacgtgacataacaggtggagccatctt

SEQ ID NO: 3198 - DNA, 44 bp, synthetic construct
  misc_feature 1..44: note = oligonucleotide decoy
  source 1..44: mol_type = other DNA
cagcgctgtttgtttacacgtgacgtaacaggtggagccatctt

SEQ ID NO: 3199 - DNA, 44 bp, synthetic construct
  misc_feature 1..44: note = oligonucleotide decoy
  source 1..44: mol_type = other DNA
cagcgctgtttgtttacacgtgatataacaggtggagccatctt

SEQ ID NO: 3200 - DNA, 44 bp, synthetic construct
  misc_feature 1..44: note = oligonucleotide decoy
  source 1..44: mol_type = other DNA
cagcgctgtttgtttacacgtgatgtaacaggtggagccatctt

SEQ ID NO: 3201 - DNA, 44 bp, synthetic construct
  misc_feature 1..44: note = oligonucleotide decoy
  source 1..44: mol_type = other DNA
cagcggtgtttatttacacgtgacataacaggtggagccatctt

SEQ ID NO: 3202 - DNA, 44 bp, synthetic construct
  misc_feature 1..44: note = oligonucleotide decoy
  source 1..44: mol_type = other DNA
cagcggtgtttatttacacgtgacgtaacaggtggagccatctt

SEQ ID NO: 3203 - DNA, 44 bp, synthetic construct
  misc_feature 1..44: note = oligonucleotide decoy
  source 1..44: mol_type = other DNA
cagcggtgtttatttacacgtgatataacaggtggagccatctt

SEQ ID NO: 3204 - DNA, 44 bp, synthetic construct
  misc_feature 1..44: note = oligonucleotide decoy
  source 1..44: mol_type = other DNA
cagcggtgtttatttacacgtgatgtaacaggtggagccatctt

SEQ ID NO: 3205 - DNA, 44 bp, synthetic construct
  misc_feature 1..44: note = oligonucleotide decoy
  source 1..44: mol_type = other DNA
cagcggtgtttgtttacacgtgacataacaggtggagccatctt

SEQ ID NO: 3206 - DNA, 44 bp, synthetic construct
  misc_feature 1..44: note = oligonucleotide decoy
  source 1..44: mol_type = other DNA
cagcggtgtttgtttacacgtgacgtaacaggtggagccatctt

SEQ ID NO: 3207 - DNA, 44 bp, synthetic construct
  misc_feature 1..44: note = oligonucleotide decoy
  source 1..44: mol_type = other DNA
cagcggtgtttgtttacacgtgatataacaggtggagccatctt

SEQ ID NO: 3208 - DNA, 44 bp, synthetic construct
  misc_feature 1..44: note = oligonucleotide decoy
  source 1..44: mol_type = other DNA
cagcggtgtttgtttacacgtgatgtaacaggtggagccatctt

SEQ ID NO: 3209 - DNA, 44 bp, synthetic construct
  misc_feature 1..44: note = oligonucleotide decoy
  source 1..44: mol_type = other DNA
cagcgttgtttatttacacgtgacataacaggtggagccatctt

SEQ ID NO: 3210 - DNA, 44 bp, synthetic construct
  misc_feature 1..44: note = oligonucleotide decoy
  source 1..44: mol_type = other DNA
cagcgttgtttatttacacgtgacgtaacaggtggagccatctt

SEQ ID NO: 3211 - DNA, 44 bp, synthetic construct
  misc_feature 1..44: note = oligonucleotide decoy
  source 1..44: mol_type = other DNA
cagcgttgtttatttacacgtgatataacaggtggagccatctt

SEQ ID NO: 3212 - DNA, 44 bp, synthetic construct
  misc_feature 1..44: note = oligonucleotide decoy
  source 1..44: mol_type = other DNA
cagcgttgtttatttacacgtgatgtaacaggtggagccatctt

SEQ ID NO: 3213 - DNA, 44 bp, synthetic construct
  misc_feature 1..44: note = oligonucleotide decoy
  source 1..44: mol_type = other DNA
cagcgttgtttgtttacacgtgacataacaggtggagccatctt

SEQ ID NO: 3214 - DNA, 44 bp, synthetic construct
  misc_feature 1..44: note = oligonucleotide decoy
  source 1..44: mol_type = other DNA
cagcgttgtttgtttacacgtgacgtaacaggtggagccatctt

SEQ ID NO: 3215 - DNA, 44 bp, synthetic construct
  misc_feature 1..44: note = oligonucleotide decoy
  source 1..44: mol_type = other DNA
cagcgttgtttgtttacacgtgatataacaggtggagccatctt

SEQ ID NO: 3216 - DNA, 44 bp, synthetic construct
  misc_feature 1..44: note = oligonucleotide decoy
  source 1..44: mol_type = other DNA
cagcgttgtttgtttacacgtgatgtaacaggtggagccatctt

SEQ ID NO: 3217 - DNA, 44 bp, synthetic construct
  misc_feature 1..44: note = oligonucleotide decoy
  source 1..44: mol_type = other DNA
catcgatgtttatttacacgtgacataacaggtggagccatctt

SEQ ID NO: 3218 - DNA, 44 bp, synthetic construct
  misc_feature 1..44: note = oligonucleotide decoy
  source 1..44: mol_type = other DNA
catcgatgtttatttacacgtgacgtaacaggtggagccatctt

SEQ ID NO: 3219 - DNA, 44 bp, synthetic construct
  misc_feature 1..44: note = oligonucleotide decoy
  source 1..44: mol_type = other DNA
catcgatgtttatttacacgtgatataacaggtggagccatctt

SEQ ID NO: 3220 - DNA, 44 bp, synthetic construct
  misc_feature 1..44: note = oligonucleotide decoy
  source 1..44: mol_type = other DNA
catcgatgtttatttacacgtgatgtaacaggtggagccatctt

SEQ ID NO: 3221 - DNA, 44 bp, synthetic construct
  misc_feature 1..44: note = oligonucleotide decoy
  source 1..44: mol_type = other DNA
catcgatgtttgtttacacgtgacataacaggtggagccatctt

SEQ ID NO: 3222 - DNA, 44 bp, synthetic construct
  misc_feature 1..44: note = oligonucleotide decoy
  source 1..44: mol_type = other DNA
catcgatgtttgtttacacgtgacgtaacaggtggagccatctt

SEQ ID NO: 3223 - DNA, 44 bp, synthetic construct
  misc_feature 1..44: note = oligonucleotide decoy
  source 1..44: mol_type = other DNA
catcgatgtttgtttacacgtgatataacaggtggagccatctt

SEQ ID NO: 3224 - DNA, 44 bp, synthetic construct
  misc_feature 1..44: note = oligonucleotide decoy
  source 1..44: mol_type = other DNA
catcgatgtttgtttacacgtgatgtaacaggtggagccatctt

SEQ ID NO: 3225 - DNA, 44 bp, synthetic construct
  misc_feature 1..44: note = oligonucleotide decoy
  source 1..44: mol_type = other DNA
catcgctgtttatttacacgtgacataacaggtggagccatctt

SEQ ID NO: 3226 - DNA, 44 bp, synthetic construct
  misc_feature 1..44: note = oligonucleotide decoy
  source 1..44: mol_type = other DNA
catcgctgtttatttacacgtgacgtaacaggtggagccatctt

SEQ ID NO: 3227 - DNA, 44 bp, synthetic construct
  misc_feature 1..44: note = oligonucleotide decoy
  source 1..44: mol_type = other DNA
catcgctgtttatttacacgtgatataacaggtggagccatctt

SEQ ID NO: 3228 - DNA, 44 bp, synthetic construct
  misc_feature 1..44: note = oligonucleotide decoy
  source 1..44: mol_type = other DNA
catcgctgtttatttacacgtgatgtaacaggtggagccatctt

SEQ ID NO: 3229 - DNA, 44 bp, synthetic construct
  misc_feature 1..44: note = oligonucleotide decoy
  source 1..44: mol_type = other DNA
catcgctgtttgtttacacgtgacataacaggtggagccatctt

SEQ ID NO: 3230 - DNA, 44 bp, synthetic construct
  misc_feature 1..44: note = oligonucleotide decoy
  source 1..44: mol_type = other DNA
catcgctgtttgtttacacgtgacgtaacaggtggagccatctt

SEQ ID NO: 3231 - DNA, 44 bp, synthetic construct
  misc_feature 1..44: note = oligonucleotide decoy
  source 1..44: mol_type = other DNA
catcgctgtttgtttacacgtgatataacaggtggagccatctt

SEQ ID NO: 3232 - DNA, 44 bp, synthetic construct
  misc_feature 1..44: note = oligonucleotide decoy
  source 1..44: mol_type = other DNA
catcgctgtttgtttacacgtgatgtaacaggtggagccatctt

SEQ ID NO: 3233 - DNA, 44 bp, synthetic construct
  misc_feature 1..44: note = oligonucleotide decoy
  source 1..44: mol_type = other DNA
catcggtgtttatttacacgtgacataacaggtggagccatctt

SEQ ID NO: 3234 - DNA, 44 bp, synthetic construct
  misc_feature 1..44: note = oligonucleotide decoy
  source 1..44: mol_type = other DNA
catcggtgtttatttacacgtgacgtaacaggtggagccatctt

SEQ ID NO: 3235 - DNA, 44 bp, synthetic construct
  misc_feature 1..44: note = oligonucleotide decoy
  source 1..44: mol_type = other DNA
catcggtgtttatttacacgtgatataacaggtggagccatctt

SEQ ID NO: 3236 - DNA, 44 bp, synthetic construct
  misc_feature 1..44: note = oligonucleotide decoy
  source 1..44: mol_type = other DNA
catcggtgtttatttacacgtgatgtaacaggtggagccatctt

SEQ ID NO: 3237 - DNA, 44 bp, synthetic construct
  misc_feature 1..44: note = oligonucleotide decoy
  source 1..44: mol_type = other DNA
catcggtgtttgtttacacgtgacataacaggtggagccatctt

SEQ ID NO: 3238 - DNA, 44 bp, synthetic construct
  misc_feature 1..44: note = oligonucleotide decoy
  source 1..44: mol_type = other DNA
catcggtgtttgtttacacgtgacgtaacaggtggagccatctt

SEQ ID NO: 3239 - DNA, 44 bp, synthetic construct
  misc_feature 1..44: note = oligonucleotide decoy
  source 1..44: mol_type = other DNA
catcggtgtttgtttacacgtgatataacaggtggagccatctt

SEQ ID NO: 3240 - DNA, 44 bp, synthetic construct
  misc_feature 1..44: note = oligonucleotide decoy
  source 1..44: mol_type = other DNA
catcggtgtttgtttacacgtgatgtaacaggtggagccatctt

SEQ ID NO: 3241 - DNA, 44 bp, synthetic construct
  misc_feature 1..44: note = oligonucleotide decoy
  source 1..44: mol_type = other DNA
catcgttgtttatttacacgtgacataacaggtggagccatctt

SEQ ID NO: 3242 - DNA, 44 bp, synthetic construct
  misc_feature 1..44: note = oligonucleotide decoy
  source 1..44: mol_type = other DNA
catcgttgtttatttacacgtgacgtaacaggtggagccatctt

SEQ ID NO: 3243 - DNA, 44 bp, synthetic construct
  misc_feature 1..44: note = oligonucleotide decoy
  source 1..44: mol_type = other DNA
catcgttgtttatttacacgtgatataacaggtggagccatctt

SEQ ID NO: 3244 - DNA, 44 bp, synthetic construct
  misc_feature 1..44: note = oligonucleotide decoy
  source 1..44: mol_type = other DNA
catcgttgtttatttacacgtgatgtaacaggtggagccatctt

SEQ ID NO: 3245 - DNA, 44 bp, synthetic construct
  misc_feature 1..44: note = oligonucleotide decoy
  source 1..44: mol_type = other DNA
catcgttgtttgtttacacgtgacataacaggtggagccatctt

SEQ ID NO: 3246 - DNA, 44 bp, synthetic construct
  misc_feature 1..44: note = oligonucleotide decoy
  source 1..44: mol_type = other DNA
catcgttgtttgtttacacgtgacgtaacaggtggagccatctt

SEQ ID NO: 3247 - DNA, 44 bp, synthetic construct
  misc_feature 1..44: note = oligonucleotide decoy
  source 1..44: mol_type = other DNA
catcgttgtttgtttacacgtgatataacaggtggagccatctt

SEQ ID NO: 3248 - DNA, 44 bp, synthetic construct
  misc_feature 1..44: note = oligonucleotide decoy
  source 1..44: mol_type = other DNA
catcgttgtttgtttacacgtgatgtaacaggtggagccatctt

SEQ ID NO: 3249 - DNA, 44 bp, synthetic construct
  misc_feature 1..44: note = oligonucleotide decoy
  source 1..44: mol_type = other DNA
caacgatgtttatttacacgtgacataacaggtggagccatttt

SEQ ID NO: 3250 - DNA, 44 bp, synthetic construct
  misc_feature 1..44: note = oligonucleotide decoy
  source 1..44: mol_type = other DNA
caacgatgtttatttacacgtgacgtaacaggtggagccatttt

SEQ ID NO: 3251 - DNA, 44 bp, synthetic construct
  misc_feature 1..44: note = oligonucleotide decoy
  source 1..44: mol_type = other DNA
caacgatgtttatttacacgtgatataacaggtggagccatttt

SEQ ID NO: 3252 - DNA, 44 bp, synthetic construct
  misc_feature 1..44: note = oligonucleotide decoy
  source 1..44: mol_type = other DNA
caacgatgtttatttacacgtgatgtaacaggtggagccatttt

SEQ ID NO: 3253 - DNA, 44 bp, synthetic construct
  misc_feature 1..44: note = oligonucleotide decoy
  source 1..44: mol_type = other DNA
caacgatgtttgtttacacgtgacataacaggtggagccatttt

SEQ ID NO: 3254 - DNA, 44 bp, synthetic construct
  misc_feature 1..44: note = oligonucleotide decoy
  source 1..44: mol_type = other DNA
caacgatgtttgtttacacgtgacgtaacaggtggagccatttt

SEQ ID NO: 3255 - DNA, 44 bp, synthetic construct
  misc_feature 1..44: note = oligonucleotide decoy
  source 1..44: mol_type = other DNA
caacgatgtttgtttacacgtgatataacaggtggagccatttt

SEQ ID NO: 3256 - DNA, 44 bp, synthetic construct
  misc_feature 1..44: note = oligonucleotide decoy
  source 1..44: mol_type = other DNA
caacgatgtttgtttacacgtgatgtaacaggtggagccatttt

SEQ ID NO: 3257 - DNA, 44 bp, synthetic construct
  misc_feature 1..44: note = oligonucleotide decoy
  source 1..44: mol_type = other DNA
caacgctgtttatttacacgtgacataacaggtggagccatttt

SEQ ID NO: 3258 - DNA, 44 bp, synthetic construct
  misc_feature 1..44: note = oligonucleotide decoy
  source 1..44: mol_type = other DNA
caacgctgtttatttacacgtgacgtaacaggtggagccatttt

SEQ ID NO: 3259 - DNA, 44 bp, synthetic construct
  misc_feature 1..44: note = oligonucleotide decoy
  source 1..44: mol_type = other DNA
caacgctgtttatttacacgtgatataacaggtggagccatttt

SEQ ID NO: 3260 - DNA, 44 bp, synthetic construct
  misc_feature 1..44: note = oligonucleotide decoy
  source 1..44: mol_type = other DNA
caacgctgtttatttacacgtgatgtaacaggtggagccatttt

SEQ ID NO: 3261 - DNA, 44 bp, synthetic construct
  misc_feature 1..44: note = oligonucleotide decoy
  source 1..44: mol_type = other DNA
caacgctgtttgtttacacgtgacataacaggtggagccatttt

SEQ ID NO: 3262 - DNA, 44 bp, synthetic construct
  misc_feature 1..44: note = oligonucleotide decoy
  source 1..44: mol_type = other DNA
caacgctgtttgtttacacgtgacgtaacaggtggagccatttt

SEQ ID NO: 3263 - DNA, 44 bp, synthetic construct
  misc_feature 1..44: note = oligonucleotide decoy
  source 1..44: mol_type = other DNA
caacgctgtttgtttacacgtgatataacaggtggagccatttt

SEQ ID NO: 3264 - DNA, 44 bp, synthetic construct
  misc_feature 1..44: note = oligonucleotide decoy
  source 1..44: mol_type = other DNA
caacgctgtttgtttacacgtgatgtaacaggtggagccatttt

SEQ ID NO: 3265 - DNA, 44 bp, synthetic construct
  misc_feature 1..44: note = oligonucleotide decoy
  source 1..44: mol_type = other DNA
caacggtgtttatttacacgtgacataacaggtggagccatttt

SEQ ID NO: 3266 - DNA, 44 bp, synthetic construct
  misc_feature 1..44: note = oligonucleotide decoy
  source 1..44: mol_type = other DNA
caacggtgtttatttacacgtgacgtaacaggtggagccatttt

SEQ ID NO: 3267 - DNA, 44 bp, synthetic construct
  misc_feature 1..44: note = oligonucleotide decoy
  source 1..44: mol_type = other DNA
caacggtgtttatttacacgtgatataacaggtggagccatttt

SEQ ID NO: 3268 - DNA, 44 bp, synthetic construct
  misc_feature 1..44: note = oligonucleotide decoy
  source 1..44: mol_type = other DNA
caacggtgtttatttacacgtgatgtaacaggtggagccatttt

SEQ ID NO: 3269 - DNA, 44 bp, synthetic construct
  misc_feature 1..44: note = oligonucleotide decoy
  source 1..44: mol_type = other DNA
caacggtgtttgtttacacgtgacataacaggtggagccatttt

SEQ ID NO: 3270 - DNA, 44 bp, synthetic construct
  misc_feature 1..44: note = oligonucleotide decoy
  source 1..44: mol_type = other DNA
caacggtgtttgtttacacgtgacgtaacaggtggagccatttt

SEQ ID NO: 3271 - DNA, 44 bp, synthetic construct
  misc_feature 1..44: note = oligonucleotide decoy
  source 1..44: mol_type = other DNA
caacggtgtttgtttacacgtgatataacaggtggagccatttt

SEQ ID NO: 3272 - DNA, 44 bp, synthetic construct
  misc_feature 1..44: note = oligonucleotide decoy
  source 1..44: mol_type = other DNA
caacggtgtttgtttacacgtgatgtaacaggtggagccatttt

SEQ ID NO: 3273 - DNA, 44 bp, synthetic construct
  misc_feature 1..44: note = oligonucleotide decoy
  source 1..44: mol_type = other DNA
caacgttgtttatttacacgtgacataacaggtggagccatttt

SEQ ID NO: 3274 - DNA, 44 bp, synthetic construct
  misc_feature 1..44: note = oligonucleotide decoy
  source 1..44: mol_type = other DNA
caacgttgtttatttacacgtgacgtaacaggtggagccatttt

SEQ ID NO: 3275 - DNA, 44 bp, synthetic construct
  misc_feature 1..44: note = oligonucleotide decoy
  source 1..44: mol_type = other DNA
caacgttgtttatttacacgtgatataacaggtggagccatttt

SEQ ID NO: 3276 - DNA, 44 bp, synthetic construct
  misc_feature 1..44: note = oligonucleotide decoy
  source 1..44: mol_type = other DNA
caacgttgtttatttacacgtgatgtaacaggtggagccatttt

SEQ ID NO: 3277 - DNA, 44 bp, synthetic construct
  misc_feature 1..44: note = oligonucleotide decoy
  source 1..44: mol_type = other DNA
caacgttgtttgtttacacgtgacataacaggtggagccatttt

SEQ ID NO: 3278 - DNA, 44 bp, synthetic construct
  misc_feature 1..44: note = oligonucleotide decoy
  source 1..44: mol_type = other DNA
caacgttgtttgtttacacgtgacgtaacaggtggagccatttt

SEQ ID NO: 3279 - DNA, 44 bp, synthetic construct
  misc_feature 1..44: note = oligonucleotide decoy
  source 1..44: mol_type = other DNA
caacgttgtttgtttacacgtgatataacaggtggagccatttt

SEQ ID NO: 3280 - DNA, 44 bp, synthetic construct
  misc_feature 1..44: note = oligonucleotide decoy
  source 1..44: mol_type = other DNA
caacgttgtttgtttacacgtgatgtaacaggtggagccatttt

SEQ ID NO: 3281 - DNA, 44 bp, synthetic construct
  misc_feature 1..44: note = oligonucleotide decoy
  source 1..44: mol_type = other DNA
caccgatgtttatttacacgtgacataacaggtggagccatttt

SEQ ID NO: 3282 - DNA, 44 bp, synthetic construct
  misc_feature 1..44: note = oligonucleotide decoy
  source 1..44: mol_type = other DNA
caccgatgtttatttacacgtgacgtaacaggtggagccatttt

SEQ ID NO: 3283 - DNA, 44 bp, synthetic construct
  misc_feature 1..44: note = oligonucleotide decoy
  source 1..44: mol_type = other DNA
caccgatgtttatttacacgtgatataacaggtggagccatttt

SEQ ID NO: 3284 - DNA, 44 bp, synthetic construct
  misc_feature 1..44: note = oligonucleotide decoy
  source 1..44: mol_type = other DNA
caccgatgtttatttacacgtgatgtaacaggtggagccatttt

SEQ ID NO: 3285 - DNA, 44 bp, synthetic construct
  misc_feature 1..44: note = oligonucleotide decoy
  source 1..44: mol_type = other DNA
caccgatgtttgtttacacgtgacataacaggtggagccatttt

SEQ ID NO: 3286 - DNA, 44 bp, synthetic construct
  misc_feature 1..44: note = oligonucleotide decoy
  source 1..44: mol_type = other DNA
caccgatgtttgtttacacgtgacgtaacaggtggagccatttt

SEQ ID NO: 3287 - DNA, 44 bp, synthetic construct
  misc_feature 1..44: note = oligonucleotide decoy
  source 1..44: mol_type = other DNA
caccgatgtttgtttacacgtgatataacaggtggagccatttt

SEQ ID NO: 3288 - DNA, 44 bp, synthetic construct
  misc_feature 1..44: note = oligonucleotide decoy
  source 1..44: mol_type = other DNA
caccgatgtttgtttacacgtgatgtaacaggtggagccatttt

SEQ ID NO: 3289 - DNA, 44 bp, synthetic construct
  misc_feature 1..44: note = oligonucleotide decoy
  source 1..44: mol_type = other DNA
caccgctgtttatttacacgtgacataacaggtggagccatttt

SEQ ID NO: 3290 - DNA, 44 bp, synthetic construct
  misc_feature 1..44: note = oligonucleotide decoy
  source 1..44: mol_type = other DNA
caccgctgtttatttacacgtgacgtaacaggtggagccatttt

SEQ ID NO: 3291 - DNA, 44 bp, synthetic construct
  misc_feature 1..44: note = oligonucleotide decoy
  source 1..44: mol_type = other DNA
caccgctgtttatttacacgtgatataacaggtggagccatttt

SEQ ID NO: 3292 - DNA, 44 bp, synthetic construct
  misc_feature 1..44: note = oligonucleotide decoy
  source 1..44: mol_type = other DNA
caccgctgtttatttacacgtgatgtaacaggtggagccatttt

SEQ ID NO: 3293 - DNA, 44 bp, synthetic construct
  misc_feature 1..44: note = oligonucleotide decoy
  source 1..44: mol_type = other DNA
caccgctgtttgtttacacgtgacataacaggtggagccatttt

SEQ ID NO: 3294 - DNA, 44 bp, synthetic construct
  misc_feature 1..44: note = oligonucleotide decoy
  source 1..44: mol_type = other DNA
caccgctgtttgtttacacgtgacgtaacaggtggagccatttt

SEQ ID NO: 3295 - DNA, 44 bp, synthetic construct
  misc_feature 1..44: note = oligonucleotide decoy
  source 1..44: mol_type = other DNA
caccgctgtttgtttacacgtgatataacaggtggagccatttt

SEQ ID NO: 3296 - DNA, 44 bp, synthetic construct
  misc_feature 1..44: note = oligonucleotide decoy
  source 1..44: mol_type = other DNA
caccgctgtttgtttacacgtgatgtaacaggtggagccatttt

SEQ ID NO: 3297 - DNA, 44 bp, synthetic construct
  misc_feature 1..44: note = oligonucleotide decoy
  source 1..44: mol_type = other DNA
caccggtgtttatttacacgtgacataacaggtggagccatttt

SEQ ID NO: 3298 - DNA, 44 bp, synthetic construct
  misc_feature 1..44: note = oligonucleotide decoy
  source 1..44: mol_type = other DNA
caccggtgtttatttacacgtgacgtaacaggtggagccatttt

SEQ ID NO: 3299 - DNA, 44 bp, synthetic construct
  misc_feature 1..44: note = oligonucleotide decoy
  source 1..44: mol_type = other DNA
caccggtgtttatttacacgtgatataacaggtggagccatttt

SEQ ID NO: 3300 - DNA, 44 bp, synthetic construct
  misc_feature 1..44: note = oligonucleotide decoy
  source 1..44: mol_type = other DNA
caccggtgtttatttacacgtgatgtaacaggtggagccatttt

SEQ ID NO: 3301 - DNA, 44 bp, synthetic construct
  misc_feature 1..44: note = oligonucleotide decoy
  source 1..44: mol_type = other DNA
caccggtgtttgtttacacgtgacataacaggtggagccatttt

SEQ ID NO: 3302 - DNA, 44 bp, synthetic construct
  misc_feature 1..44: note = oligonucleotide decoy
  source 1..44: mol_type = other DNA
caccggtgtttgtttacacgtgacgtaacaggtggagccatttt

SEQ ID NO: 3303 - DNA, 44 bp, synthetic construct
  misc_feature 1..44: note = oligonucleotide decoy
  source 1..44: mol_type = other DNA
caccggtgtttgtttacacgtgatataacaggtggagccatttt

SEQ ID NO: 3304 - DNA, 44 bp, synthetic construct
  misc_feature 1..44: note = oligonucleotide decoy
  source 1..44: mol_type = other DNA
caccggtgtttgtttacacgtgatgtaacaggtggagccatttt

SEQ ID NO: 3305 - DNA, 44 bp, synthetic construct
  misc_feature 1..44: note = oligonucleotide decoy
  source 1..44: mol_type = other DNA
caccgttgtttatttacacgtgacataacaggtggagccatttt

SEQ ID NO: 3306 - DNA, 44 bp, synthetic construct
  misc_feature 1..44: note = oligonucleotide decoy
  source 1..44: mol_type = other DNA
caccgttgtttatttacacgtgacgtaacaggtggagccatttt

SEQ ID NO: 3307 - DNA, 44 bp, synthetic construct
  misc_feature 1..44: note = oligonucleotide decoy
  source 1..44: mol_type = other DNA
caccgttgtttatttacacgtgatataacaggtggagccatttt

SEQ ID NO: 3308 - DNA, 44 bp, synthetic construct
  misc_feature 1..44: note = oligonucleotide decoy
  source 1..44: mol_type = other DNA
caccgttgtttatttacacgtgatgtaacaggtggagccatttt

SEQ ID NO: 3309 - DNA, 44 bp, synthetic construct
  misc_feature 1..44: note = oligonucleotide decoy
  source 1..44: mol_type = other DNA
caccgttgtttgtttacacgtgacataacaggtggagccatttt

SEQ ID NO: 3310 - DNA, 44 bp, synthetic construct
  misc_feature 1..44: note = oligonucleotide decoy
  source 1..44: mol_type = other DNA
caccgttgtttgtttacacgtgacgtaacaggtggagccatttt

SEQ ID NO: 3311 - DNA, 44 bp, synthetic construct
  misc_feature 1..44: note = oligonucleotide decoy
  source 1..44: mol_type = other DNA
caccgttgtttgtttacacgtgatataacaggtggagccatttt

SEQ ID NO: 3312 - DNA, 44 bp, synthetic construct
  misc_feature 1..44: note = oligonucleotide decoy
  source 1..44: mol_type = other DNA
caccgttgtttgtttacacgtgatgtaacaggtggagccatttt

SEQ ID NO: 3313 - DNA, 44 bp, synthetic construct
  misc_feature 1..44: note = oligonucleotide decoy
  source 1..44: mol_type = other DNA
cagcgatgtttatttacacgtgacataacaggtggagccatttt

SEQ ID NO: 3314 - DNA, 44 bp, synthetic construct
  misc_feature 1..44: note = oligonucleotide decoy
  source 1..44: mol_type = other DNA
cagcgatgtttatttacacgtgacgtaacaggtggagccatttt

SEQ ID NO: 3315 - DNA, 44 bp, synthetic construct
  misc_feature 1..44: note = oligonucleotide decoy
  source 1..44: mol_type = other DNA
cagcgatgtttatttacacgtgatataacaggtggagccatttt

SEQ ID NO: 3316 - DNA, 44 bp, synthetic construct
  misc_feature 1..44: note = oligonucleotide decoy
  source 1..44: mol_type = other DNA
cagcgatgtttatttacacgtgatgtaacaggtggagccatttt

SEQ ID NO: 3317 - DNA, 44 bp, synthetic construct
  misc_feature 1..44: note = oligonucleotide decoy
  source 1..44: mol_type = other DNA
cagcgatgtttgtttacacgtgacataacaggtggagccatttt

SEQ ID NO: 3318 - DNA, 44 bp, synthetic construct
  misc_feature 1..44: note = oligonucleotide decoy
  source 1..44: mol_type = other DNA
cagcgatgtttgtttacacgtgacgtaacaggtggagccatttt

SEQ ID NO: 3319 - DNA, 44 bp, synthetic construct
  misc_feature 1..44: note = oligonucleotide decoy
  source 1..44: mol_type = other DNA
cagcgatgtttgtttacacgtgatataacaggtggagccatttt

SEQ ID NO: 3320 - DNA, 44 bp, synthetic construct
  misc_feature 1..44: note = oligonucleotide decoy
  source 1..44: mol_type = other DNA
cagcgatgtttgtttacacgtgatgtaacaggtggagccatttt

SEQ ID NO: 3321 - DNA, 44 bp, synthetic construct
  misc_feature 1..44: note = oligonucleotide decoy
  source 1..44: mol_type = other DNA
cagcgctgtttatttacacgtgacataacaggtggagccatttt

SEQ ID NO: 3322 - DNA, 44 bp, synthetic construct
  misc_feature 1..44: note = oligonucleotide decoy
  source 1..44: mol_type = other DNA
cagcgctgtttatttacacgtgacgtaacaggtggagccatttt

SEQ ID NO: 3323 - DNA, 44 bp, synthetic construct
  misc_feature 1..44: note = oligonucleotide decoy
  source 1..44: mol_type = other DNA
cagcgctgtttatttacacgtgatataacaggtggagccatttt

SEQ ID NO: 3324 - DNA, 44 bp, synthetic construct
  misc_feature 1..44: note = oligonucleotide decoy
  source 1..44: mol_type = other DNA
cagcgctgtttatttacacgtgatgtaacaggtggagccatttt

SEQ ID NO: 3325 - DNA, 44 bp, synthetic construct
  misc_feature 1..44: note = oligonucleotide decoy
  source 1..44: mol_type = other DNA
cagcgctgtttgtttacacgtgacataacaggtggagccatttt

SEQ ID NO: 3326 - DNA, 44 bp, synthetic construct
  misc_feature 1..44: note = oligonucleotide decoy
  source 1..44: mol_type = other DNA
cagcgctgtttgtttacacgtgacgtaacaggtggagccatttt

SEQ ID NO: 3327 - DNA, 44 bp, synthetic construct
  misc_feature 1..44: note = oligonucleotide decoy
  source 1..44: mol_type = other DNA
cagcgctgtttgtttacacgtgatataacaggtggagccatttt

SEQ ID NO: 3328 - DNA, 44 bp, synthetic construct
  misc_feature 1..44: note = oligonucleotide decoy
  source 1..44: mol_type = other DNA
cagcgctgtttgtttacacgtgatgtaacaggtggagccatttt

SEQ ID NO: 3329 - DNA, 44 bp, synthetic construct
  misc_feature 1..44: note = oligonucleotide decoy
  source 1..44: mol_type = other DNA
cagcggtgtttatttacacgtgacataacaggtggagccatttt

SEQ ID NO: 3330 - DNA, 44 bp, synthetic construct
  misc_feature 1..44: note = oligonucleotide decoy
  source 1..44: mol_type = other DNA
cagcggtgtttatttacacgtgacgtaacaggtggagccatttt

SEQ ID NO: 3331 - DNA, 44 bp, synthetic construct
  misc_feature 1..44: note = oligonucleotide decoy
  source 1..44: mol_type = other DNA
cagcggtgtttatttacacgtgatataacaggtggagccatttt

SEQ ID NO: 3332 - DNA, 44 bp, synthetic construct
  misc_feature 1..44: note = oligonucleotide decoy
  source 1..44: mol_type = other DNA
cagcggtgtttatttacacgtgatgtaacaggtggagccatttt

SEQ ID NO: 3333 - DNA, 44 bp, synthetic construct
  misc_feature 1..44: note = oligonucleotide decoy
  source 1..44: mol_type = other DNA
cagcggtgtttgtttacacgtgacataacaggtggagccatttt

SEQ ID NO: 3334 - DNA, 44 bp, synthetic construct
  misc_feature 1..44: note = oligonucleotide decoy
  source 1..44: mol_type = other DNA
cagcggtgtttgtttacacgtgacgtaacaggtggagccatttt

SEQ ID NO: 3335 - DNA, 44 bp, synthetic construct
  misc_feature 1..44: note = oligonucleotide decoy
  source 1..44: mol_type = other DNA
cagcggtgtttgtttacacgtgatataacaggtggagccatttt

SEQ ID NO: 3336 - DNA, 44 bp, synthetic construct
  misc_feature 1..44: note = oligonucleotide decoy
  source 1..44: mol_type = other DNA
cagcggtgtttgtttacacgtgatgtaacaggtggagccatttt

SEQ ID NO: 3337 - DNA, 44 bp, synthetic construct
  misc_feature 1..44: note = oligonucleotide decoy
  source 1..44: mol_type = other DNA
cagcgttgtttatttacacgtgacataacaggtggagccatttt

SEQ ID NO: 3338 - DNA, 44 bp, synthetic construct
  misc_feature 1..44: note = oligonucleotide decoy
  source 1..44: mol_type = other DNA
cagcgttgtttatttacacgtgacgtaacaggtggagccatttt

SEQ ID NO: 3339 - DNA, 44 bp, synthetic construct
  misc_feature 1..44: note = oligonucleotide decoy
  source 1..44: mol_type = other DNA
cagcgttgtttatttacacgtgatataacaggtggagccatttt

SEQ ID NO: 3340 - DNA, 44 bp, synthetic construct
  misc_feature 1..44: note = oligonucleotide decoy
  source 1..44: mol_type = other DNA
cagcgttgtttatttacacgtgatgtaacaggtggagccatttt

SEQ ID NO: 3341 - DNA, 44 bp, synthetic construct
  misc_feature 1..44: note = oligonucleotide decoy
  source 1..44: mol_type = other DNA
cagcgttgtttgtttacacgtgacataacaggtggagccatttt

SEQ ID NO: 3342 - DNA, 44 bp, synthetic construct
  misc_feature 1..44: note = oligonucleotide decoy
  source 1..44: mol_type = other DNA
cagcgttgtttgtttacacgtgacgtaacaggtggagccatttt

SEQ ID NO: 3343 - DNA, 44 bp, synthetic construct
  misc_feature 1..44: note = oligonucleotide decoy
  source 1..44: mol_type = other DNA
cagcgttgtttgtttacacgtgatataacaggtggagccatttt

SEQ ID NO: 3344 - DNA, 44 bp, synthetic construct
  misc_feature 1..44: note = oligonucleotide decoy
  source 1..44: mol_type = other DNA
cagcgttgtttgtttacacgtgatgtaacaggtggagccatttt

SEQ ID NO: 3345 - DNA, 44 bp, synthetic construct
  misc_feature 1..44: note = oligonucleotide decoy
  source 1..44: mol_type = other DNA
catcgatgtttatttacacgtgacataacaggtggagccatttt

SEQ ID NO: 3346 - DNA, 44 bp, synthetic construct
  misc_feature 1..44: note = oligonucleotide decoy
  source 1..44: mol_type = other DNA
catcgatgtttatttacacgtgacgtaacaggtggagccatttt

SEQ ID NO: 3347 - DNA, 44 bp, synthetic construct
  misc_feature 1..44: note = oligonucleotide decoy
  source 1..44: mol_type = other DNA
catcgatgtttatttacacgtgatataacaggtggagccatttt

SEQ ID NO: 3348 - DNA, 44 bp, synthetic construct
  misc_feature 1..44: note = oligonucleotide decoy
  source 1..44: mol_type = other DNA
catcgatgtttatttacacgtgatgtaacaggtggagccatttt

SEQ ID NO: 3349 - DNA, 44 bp, synthetic construct
  misc_feature 1..44: note = oligonucleotide decoy
  source 1..44: mol_type = other DNA
catcgatgtttgtttacacgtgacataacaggtggagccatttt

SEQ ID NO: 3350 - DNA, 44 bp, synthetic construct
  misc_feature 1..44: note = oligonucleotide decoy
  source 1..44: mol_type = other DNA
catcgatgtttgtttacacgtgacgtaacaggtggagccatttt

SEQ ID NO: 3351 - DNA, 44 bp, synthetic construct
  misc_feature 1..44: note = oligonucleotide decoy
  source 1..44: mol_type = other DNA
catcgatgtttgtttacacgtgatataacaggtggagccatttt

SEQ ID NO: 3352 - DNA, 44 bp, synthetic construct
  misc_feature 1..44: note = oligonucleotide decoy
  source 1..44: mol_type = other DNA
catcgatgtttgtttacacgtgatgtaacaggtggagccatttt

SEQ ID NO: 3353 - DNA, 44 bp, synthetic construct
  misc_feature 1..44: note = oligonucleotide decoy
  source 1..44: mol_type = other DNA
catcgctgtttatttacacgtgacataacaggtggagccatttt

SEQ ID NO: 3354 - DNA, 44 bp, synthetic construct
  misc_feature 1..44: note = oligonucleotide decoy
  source 1..44: mol_type = other DNA
catcgctgtttatttacacgtgacgtaacaggtggagccatttt

SEQ ID NO: 3355 - DNA, 44 bp, synthetic construct
  misc_feature 1..44: note = oligonucleotide decoy
  source 1..44: mol_type = other DNA
catcgctgtttatttacacgtgatataacaggtggagccatttt

SEQ ID NO: 3356 - DNA, 44 bp, synthetic construct
  misc_feature 1..44: note = oligonucleotide decoy
  source 1..44: mol_type = other DNA
catcgctgtttatttacacgtgatgtaacaggtggagccatttt

SEQ ID NO: 3357 - DNA, 44 bp, synthetic construct
  misc_feature 1..44: note = oligonucleotide decoy
  source 1..44: mol_type = other DNA
catcgctgtttgtttacacgtgacataacaggtggagccatttt

SEQ ID NO: 3358 - DNA, 44 bp, synthetic construct
  misc_feature 1..44: note = oligonucleotide decoy
  source 1..44: mol_type = other DNA
catcgctgtttgtttacacgtgacgtaacaggtggagccatttt

SEQ ID NO: 3359 - DNA, 44 bp, synthetic construct
  misc_feature 1..44: note = oligonucleotide decoy
  source 1..44: mol_type = other DNA
catcgctgtttgtttacacgtgatataacaggtggagccatttt

SEQ ID NO: 3360 - DNA, 44 bp, synthetic construct
  misc_feature 1..44: note = oligonucleotide decoy
  source 1..44: mol_type = other DNA
catcgctgtttgtttacacgtgatgtaacaggtggagccatttt

SEQ ID NO: 3361 - DNA, 44 bp, synthetic construct
  misc_feature 1..44: note = oligonucleotide decoy
  source 1..44: mol_type = other DNA
catcggtgtttatttacacgtgacataacaggtggagccatttt

SEQ ID NO: 3362 - DNA, 44 bp, synthetic construct
  misc_feature 1..44: note = oligonucleotide decoy
  source 1..44: mol_type = other DNA
catcggtgtttatttacacgtgacgtaacaggtggagccatttt

SEQ ID NO: 3363 - DNA, 44 bp, synthetic construct
  misc_feature 1..44: note = oligonucleotide decoy
  source 1..44: mol_type = other DNA
catcggtgtttatttacacgtgatataacaggtggagccatttt

SEQ ID NO: 3364 - DNA, 44 bp, synthetic construct
  misc_feature 1..44: note = oligonucleotide decoy
  source 1..44: mol_type = other DNA
catcggtgtttatttacacgtgatgtaacaggtggagccatttt

SEQ ID NO: 3365 - DNA, 44 bp, synthetic construct
  misc_feature 1..44: note = oligonucleotide decoy
  source 1..44: mol_type = other DNA
catcggtgtttgtttacacgtgacataacaggtggagccatttt

SEQ ID NO: 3366 - DNA, 44 bp, synthetic construct
  misc_feature 1..44: note = oligonucleotide decoy
  source 1..44: mol_type = other DNA
catcggtgtttgtttacacgtgacgtaacaggtggagccatttt

SEQ ID NO: 3367 - DNA, 44 bp, synthetic construct
  misc_feature 1..44: note = oligonucleotide decoy
  source 1..44: mol_type = other DNA
catcggtgtttgtttacacgtgatataacaggtggagccatttt

SEQ ID NO: 3368 - DNA, 44 bp, synthetic construct
  misc_feature 1..44: note = oligonucleotide decoy
  source 1..44: mol_type = other DNA
catcggtgtttgtttacacgtgatgtaacaggtggagccatttt

SEQ ID NO: 3369 - DNA, 44 bp, synthetic construct
  misc_feature 1..44: note = oligonucleotide decoy
  source 1..44: mol_type = other DNA
catcgttgtttatttacacgtgacataacaggtggagccatttt

SEQ ID NO: 3370 - DNA, 44 bp, synthetic construct
  misc_feature 1..44: note = oligonucleotide decoy
  source 1..44: mol_type = other DNA
catcgttgtttatttacacgtgacgtaacaggtggagccatttt

SEQ ID NO: 3371 - DNA, 44 bp, synthetic construct
  misc_feature 1..44: note = oligonucleotide decoy
  source 1..44: mol_type = other DNA
catcgttgtttatttacacgtgatataacaggtggagccatttt

SEQ ID NO: 3372 - DNA, 44 bp, synthetic construct
  misc_feature 1..44: note = oligonucleotide decoy
  source 1..44: mol_type = other DNA
catcgttgtttatttacacgtgatgtaacaggtggagccatttt

SEQ ID NO: 3373 - DNA, 44 bp, synthetic construct
  misc_feature 1..44: note = oligonucleotide decoy
  source 1..44: mol_type = other DNA
catcgttgtttgtttacacgtgacataacaggtggagccatttt

SEQ ID NO: 3374 - DNA, 44 bp, synthetic construct
  misc_feature 1..44: note = oligonucleotide decoy
  source 1..44: mol_type = other DNA
catcgttgtttgtttacacgtgacgtaacaggtggagccatttt

SEQ ID NO: 3375 - DNA, 44 bp, synthetic construct
  misc_feature 1..44: note = oligonucleotide decoy
  source 1..44: mol_type = other DNA
catcgttgtttgtttacacgtgatataacaggtggagccatttt

SEQ ID NO: 3376 - DNA, 44 bp, synthetic construct
  misc_feature 1..44: note = oligonucleotide decoy
  source 1..44: mol_type = other DNA
catcgttgtttgtttacacgtgatgtaacaggtggagccatttt

SEQ ID NO: 3377 - DNA, 44 bp, synthetic construct
  misc_feature 1..44: note = oligonucleotide decoy
  source 1..44: mol_type = other DNA
caacgatgacataacacgtgtaaacaaacaggtggagccatctt

SEQ ID NO: 3378 - DNA, 44 bp, synthetic construct
  misc_feature 1..44: note = oligonucleotide decoy
  source 1..44: mol_type = other DNA
caacgatgacataacacgtgtaaataaacaggtggagccatctt

SEQ ID NO: 3379 - DNA, 44 bp, synthetic construct
  misc_feature 1..44: note = oligonucleotide decoy
  source 1..44: mol_type = other DNA
caacgatgacgtaacacgtgtaaacaaacaggtggagccatctt

SEQ ID NO: 3380 - DNA, 44 bp, synthetic construct
  misc_feature 1..44: note = oligonucleotide decoy
  source 1..44: mol_type = other DNA
caacgatgacgtaacacgtgtaaataaacaggtggagccatctt

SEQ ID NO: 3381 - DNA, 44 bp, synthetic construct
  misc_feature 1..44: note = oligonucleotide decoy
  source 1..44: mol_type = other DNA
caacgatgatataacacgtgtaaacaaacaggtggagccatctt

SEQ ID NO: 3382 - DNA, 44 bp, synthetic construct
  misc_feature 1..44: note = oligonucleotide decoy
  source 1..44: mol_type = other DNA
caacgatgatataacacgtgtaaataaacaggtggagccatctt

SEQ ID NO: 3383 - DNA, 44 bp, synthetic construct
  misc_feature 1..44: note = oligonucleotide decoy
  source 1..44: mol_type = other DNA
caacgatgatgtaacacgtgtaaacaaacaggtggagccatctt

SEQ ID NO: 3384 - DNA, 44 bp, synthetic construct
  misc_feature 1..44: note = oligonucleotide decoy
  source 1..44: mol_type = other DNA
caacgatgatgtaacacgtgtaaataaacaggtggagccatctt

SEQ ID NO: 3385 - DNA, 44 bp, synthetic construct
  misc_feature 1..44: note = oligonucleotide decoy
  source 1..44: mol_type = other DNA
caacggtgacataacacgtgtaaacaaacaggtggagccatctt

SEQ ID NO: 3386 - DNA, 44 bp, synthetic construct
  misc_feature 1..44: note = oligonucleotide decoy
  source 1..44: mol_type = other DNA
caacggtgacataacacgtgtaaataaacaggtggagccatctt

SEQ ID NO: 3387 - DNA, 44 bp, synthetic construct
  misc_feature 1..44: note = oligonucleotide decoy
  source 1..44: mol_type = other DNA
caacggtgacgtaacacgtgtaaacaaacaggtggagccatctt

SEQ ID NO: 3388 - DNA, 44 bp, synthetic construct
  misc_feature 1..44: note = oligonucleotide decoy
  source 1..44: mol_type = other DNA
caacggtgacgtaacacgtgtaaataaacaggtggagccatctt

SEQ ID NO: 3389 - DNA, 44 bp, synthetic construct
  misc_feature 1..44: note = oligonucleotide decoy
  source 1..44: mol_type = other DNA
caacggtgatataacacgtgtaaacaaacaggtggagccatctt

SEQ ID NO: 3390 - DNA, 44 bp, synthetic construct
  misc_feature 1..44: note = oligonucleotide decoy
  source 1..44: mol_type = other DNA
caacggtgatataacacgtgtaaataaacaggtggagccatctt

SEQ ID NO: 3391 - DNA, 44 bp, synthetic construct
  misc_feature 1..44: note = oligonucleotide decoy
  source 1..44: mol_type = other DNA
caacggtgatgtaacacgtgtaaacaaacaggtggagccatctt

SEQ ID NO: 3392 - DNA, 44 bp, synthetic construct
  misc_feature 1..44: note = oligonucleotide decoy
  source 1..44: mol_type = other DNA
caacggtgatgtaacacgtgtaaataaacaggtggagccatctt

SEQ ID NO: 3393 - DNA, 44 bp, synthetic construct
  misc_feature 1..44: note = oligonucleotide decoy
  source 1..44: mol_type = other DNA
caccgatgacataacacgtgtaaacaaacaggtggagccatctt

SEQ ID NO: 3394 - DNA, 44 bp, synthetic construct
  misc_feature 1..44: note = oligonucleotide decoy
  source 1..44: mol_type = other DNA
caccgatgacataacacgtgtaaataaacaggtggagccatctt

SEQ ID NO: 3395 - DNA, 44 bp, synthetic construct
  misc_feature 1..44: note = oligonucleotide decoy
  source 1..44: mol_type = other DNA
caccgatgacgtaacacgtgtaaacaaacaggtggagccatctt

SEQ ID NO: 3396 - DNA, 44 bp, synthetic construct
  misc_feature 1..44: note = oligonucleotide decoy
  source 1..44: mol_type = other DNA
caccgatgacgtaacacgtgtaaataaacaggtggagccatctt

SEQ ID NO: 3397 - DNA, 44 bp, synthetic construct
  misc_feature 1..44: note = oligonucleotide decoy
  source 1..44: mol_type = other DNA
caccgatgatataacacgtgtaaacaaacaggtggagccatctt

SEQ ID NO: 3398 - DNA, 44 bp, synthetic construct
  misc_feature 1..44: note = oligonucleotide decoy
  source 1..44: mol_type = other DNA
caccgatgatataacacgtgtaaataaacaggtggagccatctt

SEQ ID NO: 3399 - DNA, 44 bp, synthetic construct
  misc_feature 1..44: note = oligonucleotide decoy
  source 1..44: mol_type = other DNA
caccgatgatgtaacacgtgtaaacaaacaggtggagccatctt

SEQ ID NO: 3400 - DNA, 44 bp, synthetic construct
  misc_feature 1..44: note = oligonucleotide decoy
  source 1..44: mol_type = other DNA
caccgatgatgtaacacgtgtaaataaacaggtggagccatctt

SEQ ID NO: 3401 - DNA, 44 bp, synthetic construct
  misc_feature 1..44: note = oligonucleotide decoy
  source 1..44: mol_type = other DNA
caccggtgacataacacgtgtaaacaaacaggtggagccatctt

SEQ ID NO: 3402 - DNA, 44 bp, synthetic construct
  misc_feature 1..44: note = oligonucleotide decoy
  source 1..44: mol_type = other DNA
caccggtgacataacacgtgtaaataaacaggtggagccatctt

SEQ ID NO: 3403 - DNA, 44 bp, synthetic construct
  misc_feature 1..44: note = oligonucleotide decoy
  source 1..44: mol_type = other DNA
caccggtgacgtaacacgtgtaaacaaacaggtggagccatctt

SEQ ID NO: 3404 - DNA, 44 bp, synthetic construct
  misc_feature 1..44: note = oligonucleotide decoy
  source 1..44: mol_type = other DNA
caccggtgacgtaacacgtgtaaataaacaggtggagccatctt

SEQ ID NO: 3405 - DNA, 44 bp, synthetic construct
  misc_feature 1..44: note = oligonucleotide decoy
  source 1..44: mol_type = other DNA
caccggtgatataacacgtgtaaacaaacaggtggagccatctt

SEQ ID NO: 3406 - DNA, 44 bp, synthetic construct
  misc_feature 1..44: note = oligonucleotide decoy
  source 1..44: mol_type = other DNA
caccggtgatataacacgtgtaaataaacaggtggagccatctt

SEQ ID NO: 3407 - DNA, 44 bp, synthetic construct
  misc_feature 1..44: note = oligonucleotide decoy
  source 1..44: mol_type = other DNA
caccggtgatgtaacacgtgtaaacaaacaggtggagccatctt

SEQ ID NO: 3408 - DNA, 44 bp, synthetic construct
  misc_feature 1..44: note = oligonucleotide decoy
  source 1..44: mol_type = other DNA
caccggtgatgtaacacgtgtaaataaacaggtggagccatctt

SEQ ID NO: 3409 - DNA, 44 bp, synthetic construct
  misc_feature 1..44: note = oligonucleotide decoy
  source 1..44: mol_type = other DNA
cagcgatgacataacacgtgtaaacaaacaggtggagccatctt

SEQ ID NO: 3410 - DNA, 44 bp, synthetic construct
  misc_feature 1..44: note = oligonucleotide decoy
  source 1..44: mol_type = other DNA
cagcgatgacataacacgtgtaaataaacaggtggagccatctt

SEQ ID NO: 3411 - DNA, 44 bp, synthetic construct
  misc_feature 1..44: note = oligonucleotide decoy
  source 1..44: mol_type = other DNA
cagcgatgacgtaacacgtgtaaacaaacaggtggagccatctt

SEQ ID NO: 3412 - DNA, 44 bp, synthetic construct
  misc_feature 1..44: note = oligonucleotide decoy
  source 1..44: mol_type = other DNA
cagcgatgacgtaacacgtgtaaataaacaggtggagccatctt

SEQ ID NO: 3413 - DNA, 44 bp, synthetic construct
  misc_feature 1..44: note = oligonucleotide decoy
  source 1..44: mol_type = other DNA
cagcgatgatataacacgtgtaaacaaacaggtggagccatctt

SEQ ID NO: 3414 - DNA, 44 bp, synthetic construct
  misc_feature 1..44: note = oligonucleotide decoy
  source 1..44: mol_type = other DNA
cagcgatgatataacacgtgtaaataaacaggtggagccatctt

SEQ ID NO: 3415 - DNA, 44 bp, synthetic construct
  misc_feature 1..44: note = oligonucleotide decoy
  source 1..44: mol_type = other DNA
cagcgatgatgtaacacgtgtaaacaaacaggtggagccatctt

SEQ ID NO: 3416 - DNA, 44 bp, synthetic construct
  misc_feature 1..44: note = oligonucleotide decoy
  source 1..44: mol_type = other DNA
cagcgatgatgtaacacgtgtaaataaacaggtggagccatctt

SEQ ID NO: 3417 - DNA, 44 bp, synthetic construct
  misc_feature 1..44: note = oligonucleotide decoy
  source 1..44: mol_type = other DNA
cagcggtgacataacacgtgtaaacaaacaggtggagccatctt

SEQ ID NO: 3418 - DNA, 44 bp, synthetic construct
  misc_feature 1..44: note = oligonucleotide decoy
  source 1..44: mol_type = other DNA
cagcggtgacataacacgtgtaaataaacaggtggagccatctt

SEQ ID NO: 3419 - DNA, 44 bp, synthetic construct
  misc_feature 1..44: note = oligonucleotide decoy
  source 1..44: mol_type = other DNA
cagcggtgacgtaacacgtgtaaacaaacaggtggagccatctt

SEQ ID NO: 3420 - DNA, 44 bp, synthetic construct
  misc_feature 1..44: note = oligonucleotide decoy
  source 1..44: mol_type = other DNA
cagcggtgacgtaacacgtgtaaataaacaggtggagccatctt

SEQ ID NO: 3421 - DNA, 44 bp, synthetic construct
  misc_feature 1..44: note = oligonucleotide decoy
  source 1..44: mol_type = other DNA
cagcggtgatataacacgtgtaaacaaacaggtggagccatctt

SEQ ID NO: 3422 - DNA, 44 bp, synthetic construct
  misc_feature 1..44: note = oligonucleotide decoy
  source 1..44: mol_type = other DNA
cagcggtgatataacacgtgtaaataaacaggtggagccatctt

SEQ ID NO: 3423 - DNA, 44 bp, synthetic construct
  misc_feature 1..44: note = oligonucleotide decoy
  source 1..44: mol_type = other DNA
cagcggtgatgtaacacgtgtaaacaaacaggtggagccatctt

SEQ ID NO: 3424 - DNA, 44 bp, synthetic construct
  misc_feature 1..44: note = oligonucleotide decoy
  source 1..44: mol_type = other DNA
cagcggtgatgtaacacgtgtaaataaacaggtggagccatctt

SEQ ID NO: 3425 - DNA, 44 bp, synthetic construct
  misc_feature 1..44: note = oligonucleotide decoy
  source 1..44: mol_type = other DNA
catcgatgacataacacgtgtaaacaaacaggtggagccatctt

SEQ ID NO: 3426 - DNA, 44 bp, synthetic construct
  misc_feature 1..44: note = oligonucleotide decoy
  source 1..44: mol_type = other DNA
catcgatgacataacacgtgtaaataaacaggtggagccatctt

SEQ ID NO: 3427 - DNA, 44 bp, synthetic construct
  misc_feature 1..44: note = oligonucleotide decoy
  source 1..44: mol_type = other DNA
catcgatgacgtaacacgtgtaaacaaacaggtggagccatctt

SEQ ID NO: 3428 - DNA, 44 bp, synthetic construct
  misc_feature 1..44: note = oligonucleotide decoy
  source 1..44: mol_type = other DNA
catcgatgacgtaacacgtgtaaataaacaggtggagccatctt

SEQ ID NO: 3429 - DNA, 44 bp, synthetic construct
  misc_feature 1..44: note = oligonucleotide decoy
  source 1..44: mol_type = other DNA
catcgatgatataacacgtgtaaacaaacaggtggagccatctt

SEQ ID NO: 3430 - DNA, 44 bp, synthetic construct
  misc_feature 1..44: note = oligonucleotide decoy
  source 1..44: mol_type = other DNA
catcgatgatataacacgtgtaaataaacaggtggagccatctt

SEQ ID NO: 3431 - DNA, 44 bp, synthetic construct
  misc_feature 1..44: note = oligonucleotide decoy
  source 1..44: mol_type = other DNA
catcgatgatgtaacacgtgtaaacaaacaggtggagccatctt

SEQ ID NO: 3432 - DNA, 44 bp, synthetic construct
  misc_feature 1..44: note = oligonucleotide decoy
  source 1..44: mol_type = other DNA
catcgatgatgtaacacgtgtaaataaacaggtggagccatctt

SEQ ID NO: 3433 - DNA, 44 bp, synthetic construct
  misc_feature 1..44: note = oligonucleotide decoy
  source 1..44: mol_type = other DNA
catcggtgacataacacgtgtaaacaaacaggtggagccatctt

SEQ ID NO: 3434 - DNA, 44 bp, synthetic construct
  misc_feature 1..44: note = oligonucleotide decoy
  source 1..44: mol_type = other DNA
catcggtgacataacacgtgtaaataaacaggtggagccatctt

SEQ ID NO: 3435 - DNA, 44 bp, synthetic construct
  misc_feature 1..44: note = oligonucleotide decoy
  source 1..44: mol_type = other DNA
catcggtgacgtaacacgtgtaaacaaacaggtggagccatctt

SEQ ID NO: 3436 - DNA, 44 bp, synthetic construct
  misc_feature 1..44: note = oligonucleotide decoy
  source 1..44: mol_type = other DNA
catcggtgacgtaacacgtgtaaataaacaggtggagccatctt

SEQ ID NO: 3437 - DNA, 44 bp, synthetic construct
  misc_feature 1..44: note = oligonucleotide decoy
  source 1..44: mol_type = other DNA
catcggtgatataacacgtgtaaacaaacaggtggagccatctt

SEQ ID NO: 3438 - DNA, 44 bp, synthetic construct
  misc_feature 1..44: note = oligonucleotide decoy
  source 1..44: mol_type = other DNA
catcggtgatataacacgtgtaaataaacaggtggagccatctt

SEQ ID NO: 3439 - DNA, 44 bp, synthetic construct
  misc_feature 1..44: note = oligonucleotide decoy
  source 1..44: mol_type = other DNA
catcggtgatgtaacacgtgtaaacaaacaggtggagccatctt

SEQ ID NO: 3440 - DNA, 44 bp, synthetic construct
  misc_feature 1..44: note = oligonucleotide decoy
  source 1..44: mol_type = other DNA
catcggtgatgtaacacgtgtaaataaacaggtggagccatctt

SEQ ID NO: 3441 - DNA, 44 bp, synthetic construct
  misc_feature 1..44: note = oligonucleotide decoy
  source 1..44: mol_type = other DNA
caacgatgacataacacgtgtaaacaaacaggtggagccatttt

SEQ ID NO: 3442 - DNA, 44 bp, synthetic construct
  misc_feature 1..44: note = oligonucleotide decoy
  source 1..44: mol_type = other DNA
caacgatgacataacacgtgtaaataaacaggtggagccatttt

SEQ ID NO: 3443 - DNA, 44 bp, synthetic construct
  misc_feature 1..44: note = oligonucleotide decoy
  source 1..44: mol_type = other DNA
caacgatgacgtaacacgtgtaaacaaacaggtggagccatttt

SEQ ID NO: 3444 - DNA, 44 bp, synthetic construct
  misc_feature 1..44: note = oligonucleotide decoy
  source 1..44: mol_type = other DNA
caacgatgacgtaacacgtgtaaataaacaggtggagccatttt

SEQ ID NO: 3445 - DNA, 44 bp, synthetic construct
  misc_feature 1..44: note = oligonucleotide decoy
  source 1..44: mol_type = other DNA
caacgatgatataacacgtgtaaacaaacaggtggagccatttt

SEQ ID NO: 3446 - DNA, 44 bp, synthetic construct
  misc_feature 1..44: note = oligonucleotide decoy
  source 1..44: mol_type = other DNA
caacgatgatataacacgtgtaaataaacaggtggagccatttt

SEQ ID NO: 3447 - DNA, 44 bp, synthetic construct
  misc_feature 1..44: note = oligonucleotide decoy
  source 1..44: mol_type = other DNA
caacgatgatgtaacacgtgtaaacaaacaggtggagccatttt

SEQ ID NO: 3448 - DNA, 44 bp, synthetic construct
  misc_feature 1..44: note = oligonucleotide decoy
  source 1..44: mol_type = other DNA
caacgatgatgtaacacgtgtaaataaacaggtggagccatttt

SEQ ID NO: 3449 - DNA, 44 bp, synthetic construct
  misc_feature 1..44: note = oligonucleotide decoy
  source 1..44: mol_type = other DNA
caacggtgacataacacgtgtaaacaaacaggtggagccatttt

SEQ ID NO: 3450 - DNA, 44 bp, synthetic construct
  misc_feature 1..44: note = oligonucleotide decoy
  source 1..44: mol_type = other DNA
caacggtgacataacacgtgtaaataaacaggtggagccatttt

SEQ ID NO: 3451 - DNA, 44 bp, synthetic construct
  misc_feature 1..44: note = oligonucleotide decoy
  source 1..44: mol_type = other DNA
caacggtgacgtaacacgtgtaaacaaacaggtggagccatttt

SEQ ID NO: 3452 - DNA, 44 bp, synthetic construct
  misc_feature 1..44: note = oligonucleotide decoy
  source 1..44: mol_type = other DNA
caacggtgacgtaacacgtgtaaataaacaggtggagccatttt

SEQ ID NO: 3453 - DNA, 44 bp, synthetic construct
  misc_feature 1..44: note = oligonucleotide decoy
  source 1..44: mol_type = other DNA
caacggtgatataacacgtgtaaacaaacaggtggagccatttt

SEQ ID NO: 3454 - DNA, 44 bp, synthetic construct
  misc_feature 1..44: note = oligonucleotide decoy
  source 1..44: mol_type = other DNA
caacggtgatataacacgtgtaaataaacaggtggagccatttt

SEQ ID NO: 3455 - DNA, 44 bp, synthetic construct
  misc_feature 1..44: note = oligonucleotide decoy
  source 1..44: mol_type = other DNA
caacggtgatgtaacacgtgtaaacaaacaggtggagccatttt

SEQ ID NO: 3456 - DNA, 44 bp, synthetic construct
  misc_feature 1..44: note = oligonucleotide decoy
  source 1..44: mol_type = other DNA
caacggtgatgtaacacgtgtaaataaacaggtggagccatttt

SEQ ID NO: 3457 - DNA, 44 bp, synthetic construct
  misc_feature 1..44: note = oligonucleotide decoy
  source 1..44: mol_type = other DNA
caccgatgacataacacgtgtaaacaaacaggtggagccatttt

SEQ ID NO: 3458 - DNA, 44 bp, synthetic construct
  misc_feature 1..44: note = oligonucleotide decoy
  source 1..44: mol_type = other DNA
caccgatgacataacacgtgtaaataaacaggtggagccatttt

SEQ ID NO: 3459 - DNA, 44 bp, synthetic construct
  misc_feature 1..44: note = oligonucleotide decoy
  source 1..44: mol_type = other DNA
caccgatgacgtaacacgtgtaaacaaacaggtggagccatttt

SEQ ID NO: 3460 - DNA, 44 bp, synthetic construct
  misc_feature 1..44: note = oligonucleotide decoy
  source 1..44: mol_type = other DNA
caccgatgacgtaacacgtgtaaataaacaggtggagccatttt

SEQ ID NO: 3461 - DNA, 44 bp, synthetic construct
  misc_feature 1..44: note = oligonucleotide decoy
  source 1..44: mol_type = other DNA
caccgatgatataacacgtgtaaacaaacaggtggagccatttt

SEQ ID NO: 3462 - DNA, 44 bp, synthetic construct
  misc_feature 1..44: note = oligonucleotide decoy
  source 1..44: mol_type = other DNA
caccgatgatataacacgtgtaaataaacaggtggagccatttt

SEQ ID NO: 3463 - DNA, 44 bp, synthetic construct
  misc_feature 1..44: note = oligonucleotide decoy
  source 1..44: mol_type = other DNA
caccgatgatgtaacacgtgtaaacaaacaggtggagccatttt

SEQ ID NO: 3464 - DNA, 44 bp, synthetic construct
  misc_feature 1..44: note = oligonucleotide decoy
  source 1..44: mol_type = other DNA
caccgatgatgtaacacgtgtaaataaacaggtggagccatttt

SEQ ID NO: 3465 - DNA, 44 bp, synthetic construct
  misc_feature 1..44: note = oligonucleotide decoy
  source 1..44: mol_type = other DNA
caccggtgacataacacgtgtaaacaaacaggtggagccatttt

SEQ ID NO: 3466 - DNA, 44 bp, synthetic construct
  misc_feature 1..44: note = oligonucleotide decoy
  source 1..44: mol_type = other DNA
caccggtgacataacacgtgtaaataaacaggtggagccatttt

SEQ ID NO: 3467 - DNA, 44 bp, synthetic construct
  misc_feature 1..44: note = oligonucleotide decoy
  source 1..44: mol_type = other DNA
caccggtgacgtaacacgtgtaaacaaacaggtggagccatttt

SEQ ID NO: 3468 - DNA, 44 bp, synthetic construct
  misc_feature 1..44: note = oligonucleotide decoy
  source 1..44: mol_type = other DNA
caccggtgacgtaacacgtgtaaataaacaggtggagccatttt

SEQ ID NO: 3469 - DNA, 44 bp, synthetic construct
  misc_feature 1..44: note = oligonucleotide decoy
  source 1..44: mol_type = other DNA
caccggtgatataacacgtgtaaacaaacaggtggagccatttt

SEQ ID NO: 3470 - DNA, 44 bp, synthetic construct
  misc_feature 1..44: note = oligonucleotide decoy
  source 1..44: mol_type = other DNA
caccggtgatataacacgtgtaaataaacaggtggagccatttt

SEQ ID NO: 3471 - DNA, 44 bp, synthetic construct
  misc_feature 1..44: note = oligonucleotide decoy
  source 1..44: mol_type = other DNA
caccggtgatgtaacacgtgtaaacaaacaggtggagccatttt

SEQ ID NO: 3472 - DNA, 44 bp, synthetic construct
  misc_feature 1..44: note = oligonucleotide decoy
  source 1..44: mol_type = other DNA
caccggtgatgtaacacgtgtaaataaacaggtggagccatttt

SEQ ID NO: 3473 - DNA, 44 bp, synthetic construct
  misc_feature 1..44: note = oligonucleotide decoy
  source 1..44: mol_type = other DNA
cagcgatgacataacacgtgtaaacaaacaggtggagccatttt

SEQ ID NO: 3474 - DNA, 44 bp, synthetic construct
  misc_feature 1..44: note = oligonucleotide decoy
  source 1..44: mol_type = other DNA
cagcgatgacataacacgtgtaaataaacaggtggagccatttt

SEQ ID NO: 3475 - DNA, 44 bp, synthetic construct
  misc_feature 1..44: note = oligonucleotide decoy
  source 1..44: mol_type = other DNA
cagcgatgacgtaacacgtgtaaacaaacaggtggagccatttt

SEQ ID NO: 3476 - DNA, 44 bp, synthetic construct
  misc_feature 1..44: note = oligonucleotide decoy
  source 1..44: mol_type = other DNA
cagcgatgacgtaacacgtgtaaataaacaggtggagccatttt

SEQ ID NO: 3477 - DNA, 44 bp, synthetic construct
  misc_feature 1..44: note = oligonucleotide decoy
  source 1..44: mol_type = other DNA
cagcgatgatataacacgtgtaaacaaacaggtggagccatttt

SEQ ID NO: 3478 - DNA, 44 bp, synthetic construct
  misc_feature 1..44: note = oligonucleotide decoy
  source 1..44: mol_type = other DNA
cagcgatgatataacacgtgtaaataaacaggtggagccatttt

SEQ ID NO: 3479 - DNA, 44 bp, synthetic construct
  misc_feature 1..44: note = oligonucleotide decoy
  source 1..44: mol_type = other DNA
cagcgatgatgtaacacgtgtaaacaaacaggtggagccatttt

SEQ ID NO: 3480 - DNA, 44 bp, synthetic construct
  misc_feature 1..44: note = oligonucleotide decoy
  source 1..44: mol_type = other DNA
cagcgatgatgtaacacgtgtaaataaacaggtggagccatttt

SEQ ID NO: 3481 - DNA, 44 bp, synthetic construct
  misc_feature 1..44: note = oligonucleotide decoy
  source 1..44: mol_type = other DNA
cagcggtgacataacacgtgtaaacaaacaggtggagccatttt

SEQ ID NO: 3482 - DNA, 44 bp, synthetic construct
  misc_feature 1..44: note = oligonucleotide decoy
  source 1..44: mol_type = other DNA
cagcggtgacataacacgtgtaaataaacaggtggagccatttt

SEQ ID NO: 3483 - DNA, 44 bp, synthetic construct
  misc_feature 1..44: note = oligonucleotide decoy
  source 1..44: mol_type = other DNA
cagcggtgacgtaacacgtgtaaacaaacaggtggagccatttt

SEQ ID NO: 3484 - DNA, 44 bp, synthetic construct
  misc_feature 1..44: note = oligonucleotide decoy
  source 1..44: mol_type = other DNA
cagcggtgacgtaacacgtgtaaataaacaggtggagccatttt

SEQ ID NO: 3485 - DNA, 44 bp, synthetic construct
  misc_feature 1..44: note = oligonucleotide decoy
  source 1..44: mol_type = other DNA
cagcggtgatataacacgtgtaaacaaacaggtggagccatttt

SEQ ID NO: 3486 - DNA, 44 bp, synthetic construct
  misc_feature 1..44: note = oligonucleotide decoy
  source 1..44: mol_type = other DNA
cagcggtgatataacacgtgtaaataaacaggtggagccatttt

SEQ ID NO: 3487 - DNA, 44 bp, synthetic construct
  misc_feature 1..44: note = oligonucleotide decoy
  source 1..44: mol_type = other DNA
cagcggtgatgtaacacgtgtaaacaaacaggtggagccatttt

SEQ ID NO: 3488 - DNA, 44 bp, synthetic construct
  misc_feature 1..44: note = oligonucleotide decoy
  source 1..44: mol_type = other DNA
cagcggtgatgtaacacgtgtaaataaacaggtggagccatttt

SEQ ID NO: 3489 - DNA, 44 bp, synthetic construct
  misc_feature 1..44: note = oligonucleotide decoy
  source 1..44: mol_type = other DNA
catcgatgacataacacgtgtaaacaaacaggtggagccatttt

SEQ ID NO: 3490 - DNA, 44 bp, synthetic construct
  misc_feature 1..44: note = oligonucleotide decoy
  source 1..44: mol_type = other DNA
catcgatgacataacacgtgtaaataaacaggtggagccatttt

SEQ ID NO: 3491 - DNA, 44 bp, synthetic construct
  misc_feature 1..44: note = oligonucleotide decoy
  source 1..44: mol_type = other DNA
catcgatgacgtaacacgtgtaaacaaacaggtggagccatttt

SEQ ID NO: 3492 - DNA, 44 bp, synthetic construct
  misc_feature 1..44: note = oligonucleotide decoy
  source 1..44: mol_type = other DNA
catcgatgacgtaacacgtgtaaataaacaggtggagccatttt

SEQ ID NO: 3493 - DNA, 44 bp, synthetic construct
  misc_feature 1..44: note = oligonucleotide decoy
  source 1..44: mol_type = other DNA
catcgatgatataacacgtgtaaacaaacaggtggagccatttt

SEQ ID NO: 3494 - DNA, 44 bp, synthetic construct
  misc_feature 1..44: note = oligonucleotide decoy
  source 1..44: mol_type = other DNA
catcgatgatataacacgtgtaaataaacaggtggagccatttt

SEQ ID NO: 3495 - DNA, 44 bp, synthetic construct
  misc_feature 1..44: note = oligonucleotide decoy
  source 1..44: mol_type = other DNA
catcgatgatgtaacacgtgtaaacaaacaggtggagccatttt

SEQ ID NO: 3496 - DNA, 44 bp, synthetic construct
  misc_feature 1..44: note = oligonucleotide decoy
  source 1..44: mol_type = other DNA
catcgatgatgtaacacgtgtaaataaacaggtggagccatttt

SEQ ID NO: 3497 - DNA, 44 bp, synthetic construct
  misc_feature 1..44: note = oligonucleotide decoy
  source 1..44: mol_type = other DNA
catcggtgacataacacgtgtaaacaaacaggtggagccatttt

SEQ ID NO: 3498 - DNA, 44 bp, synthetic construct
  misc_feature 1..44: note = oligonucleotide decoy
  source 1..44: mol_type = other DNA
catcggtgacataacacgtgtaaataaacaggtggagccatttt

SEQ ID NO: 3499 - DNA, 44 bp, synthetic construct
  misc_feature 1..44: note = oligonucleotide decoy
  source 1..44: mol_type = other DNA
catcggtgacgtaacacgtgtaaacaaacaggtggagccatttt

SEQ ID NO: 3500 - DNA, 44 bp, synthetic construct
  misc_feature 1..44: note = oligonucleotide decoy
  source 1..44: mol_type = other DNA
catcggtgacgtaacacgtgtaaataaacaggtggagccatttt

SEQ ID NO: 3501 - DNA, 44 bp, synthetic construct
  misc_feature 1..44: note = oligonucleotide decoy
  source 1..44: mol_type = other DNA
catcggtgatataacacgtgtaaacaaacaggtggagccatttt

SEQ ID NO: 3502 - DNA, 44 bp, synthetic construct
  misc_feature 1..44: note = oligonucleotide decoy
  source 1..44: mol_type = other DNA
catcggtgatataacacgtgtaaataaacaggtggagccatttt

SEQ ID NO: 3503 - DNA, 44 bp, synthetic construct
  misc_feature 1..44: note = oligonucleotide decoy
  source 1..44: mol_type = other DNA
catcggtgatgtaacacgtgtaaacaaacaggtggagccatttt

SEQ ID NO: 3504 - DNA, 44 bp, synthetic construct
  misc_feature 1..44: note = oligonucleotide decoy
  source 1..44: mol_type = other DNA
catcggtgatgtaacacgtgtaaataaacaggtggagccatttt

SEQ ID NO: 3505 - DNA, 44 bp, synthetic construct
  misc_feature 1..44: note = oligonucleotide decoy
  source 1..44: mol_type = other DNA
caacgatgttacatcacgtgtaaacaaacaggtggagccatctt

SEQ ID NO: 3506 - DNA, 44 bp, synthetic construct
  misc_feature 1..44: note = oligonucleotide decoy
  source 1..44: mol_type = other DNA
caacgatgttacatcacgtgtaaataaacaggtggagccatctt

SEQ ID NO: 3507 - DNA, 44 bp, synthetic construct
  misc_feature 1..44: note = oligonucleotide decoy
  source 1..44: mol_type = other DNA
caacgatgttacgtcacgtgtaaacaaacaggtggagccatctt

SEQ ID NO: 3508 - DNA, 44 bp, synthetic construct
  misc_feature 1..44: note = oligonucleotide decoy
  source 1..44: mol_type = other DNA
caacgatgttacgtcacgtgtaaataaacaggtggagccatctt

SEQ ID NO: 3509 - DNA, 44 bp, synthetic construct
  misc_feature 1..44: note = oligonucleotide decoy
  source 1..44: mol_type = other DNA
caacgatgttatatcacgtgtaaacaaacaggtggagccatctt

SEQ ID NO: 3510 - DNA, 44 bp, synthetic construct
  misc_feature 1..44: note = oligonucleotide decoy
  source 1..44: mol_type = other DNA
caacgatgttatatcacgtgtaaataaacaggtggagccatctt

SEQ ID NO: 3511 - DNA, 44 bp, synthetic construct
  misc_feature 1..44: note = oligonucleotide decoy
  source 1..44: mol_type = other DNA
caacgatgttatgtcacgtgtaaacaaacaggtggagccatctt

SEQ ID NO: 3512 - DNA, 44 bp, synthetic construct
  misc_feature 1..44: note = oligonucleotide decoy
  source 1..44: mol_type = other DNA
caacgatgttatgtcacgtgtaaataaacaggtggagccatctt

SEQ ID NO: 3513 - DNA, 44 bp, synthetic construct
  misc_feature 1..44: note = oligonucleotide decoy
  source 1..44: mol_type = other DNA
caacgctgttacatcacgtgtaaacaaacaggtggagccatctt

SEQ ID NO: 3514 - DNA, 44 bp, synthetic construct
  misc_feature 1..44: note = oligonucleotide decoy
  source 1..44: mol_type = other DNA
caacgctgttacatcacgtgtaaataaacaggtggagccatctt

SEQ ID NO: 3515 - DNA, 44 bp, synthetic construct
  misc_feature 1..44: note = oligonucleotide decoy
  source 1..44: mol_type = other DNA
caacgctgttacgtcacgtgtaaacaaacaggtggagccatctt

SEQ ID NO: 3516 - DNA, 44 bp, synthetic construct
  misc_feature 1..44: note = oligonucleotide decoy
  source 1..44: mol_type = other DNA
caacgctgttacgtcacgtgtaaataaacaggtggagccatctt

SEQ ID NO: 3517 - DNA, 44 bp, synthetic construct
  misc_feature 1..44: note = oligonucleotide decoy
  source 1..44: mol_type = other DNA
caacgctgttatatcacgtgtaaacaaacaggtggagccatctt

SEQ ID NO: 3518 - DNA, 44 bp, synthetic construct
  misc_feature 1..44: note = oligonucleotide decoy
  source 1..44: mol_type = other DNA
caacgctgttatatcacgtgtaaataaacaggtggagccatctt

SEQ ID NO: 3519 - DNA, 44 bp, synthetic construct
  misc_feature 1..44: note = oligonucleotide decoy
  source 1..44: mol_type = other DNA
caacgctgttatgtcacgtgtaaacaaacaggtggagccatctt

SEQ ID NO: 3520 - DNA, 44 bp, synthetic construct
  misc_feature 1..44: note = oligonucleotide decoy
  source 1..44: mol_type = other DNA
caacgctgttatgtcacgtgtaaataaacaggtggagccatctt

SEQ ID NO: 3521 - DNA, 44 bp, synthetic construct
  misc_feature 1..44: note = oligonucleotide decoy
  source 1..44: mol_type = other DNA
caacggtgttacatcacgtgtaaacaaacaggtggagccatctt

SEQ ID NO: 3522 - DNA, 44 bp, synthetic construct
  misc_feature 1..44: note = oligonucleotide decoy
  source 1..44: mol_type = other DNA
caacggtgttacatcacgtgtaaataaacaggtggagccatctt

SEQ ID NO: 3523 - DNA, 44 bp, synthetic construct
  misc_feature 1..44: note = oligonucleotide decoy
  source 1..44: mol_type = other DNA
caacggtgttacgtcacgtgtaaacaaacaggtggagccatctt

SEQ ID NO: 3524 - DNA, 44 bp, synthetic construct
  misc_feature 1..44: note = oligonucleotide decoy
  source 1..44: mol_type = other DNA
caacggtgttacgtcacgtgtaaataaacaggtggagccatctt

SEQ ID NO: 3525 - DNA, 44 bp, synthetic construct
  misc_feature 1..44: note = oligonucleotide decoy
  source 1..44: mol_type = other DNA
caacggtgttatatcacgtgtaaacaaacaggtggagccatctt

SEQ ID NO: 3526 - DNA, 44 bp, synthetic construct
  misc_feature 1..44: note = oligonucleotide decoy
  source 1..44: mol_type = other DNA
caacggtgttatatcacgtgtaaataaacaggtggagccatctt

SEQ ID NO: 3527 - DNA, 44 bp, synthetic construct
  misc_feature 1..44: note = oligonucleotide decoy
  source 1..44: mol_type = other DNA
caacggtgttatgtcacgtgtaaacaaacaggtggagccatctt

SEQ ID NO: 3528 - DNA, 44 bp, synthetic construct
  misc_feature 1..44: note = oligonucleotide decoy
  source 1..44: mol_type = other DNA
caacggtgttatgtcacgtgtaaataaacaggtggagccatctt

SEQ ID NO: 3529 - DNA, 44 bp, synthetic construct
  misc_feature 1..44: note = oligonucleotide decoy
  source 1..44: mol_type = other DNA
caacgttgttacatcacgtgtaaacaaacaggtggagccatctt

SEQ ID NO: 3530 - DNA, 44 bp, synthetic construct
  misc_feature 1..44: note = oligonucleotide decoy
  source 1..44: mol_type = other DNA
caacgttgttacatcacgtgtaaataaacaggtggagccatctt

SEQ ID NO: 3531 - DNA, 44 bp, synthetic construct
  misc_feature 1..44: note = oligonucleotide decoy
  source 1..44: mol_type = other DNA
caacgttgttacgtcacgtgtaaacaaacaggtggagccatctt

SEQ ID NO: 3532 - DNA, 44 bp, synthetic construct
  misc_feature 1..44: note = oligonucleotide decoy
  source 1..44: mol_type = other DNA
caacgttgttacgtcacgtgtaaataaacaggtggagccatctt

SEQ ID NO: 3533 - DNA, 44 bp, synthetic construct
  misc_feature 1..44: note = oligonucleotide decoy
  source 1..44: mol_type = other DNA
caacgttgttatatcacgtgtaaacaaacaggtggagccatctt

SEQ ID NO: 3534 - DNA, 44 bp, synthetic construct
  misc_feature 1..44: note = oligonucleotide decoy
  source 1..44: mol_type = other DNA
caacgttgttatatcacgtgtaaataaacaggtggagccatctt

SEQ ID NO: 3535 - DNA, 44 bp, synthetic construct
  misc_feature 1..44: note = oligonucleotide decoy
  source 1..44: mol_type = other DNA
caacgttgttatgtcacgtgtaaacaaacaggtggagccatctt

SEQ ID NO: 3536 - DNA, 44 bp, synthetic construct
  misc_feature 1..44: note = oligonucleotide decoy
  source 1..44: mol_type = other DNA
caacgttgttatgtcacgtgtaaataaacaggtggagccatctt

SEQ ID NO: 3537 - DNA, 44 bp, synthetic construct
  misc_feature 1..44: note = oligonucleotide decoy
  source 1..44: mol_type = other DNA
caccgatgttacatcacgtgtaaacaaacaggtggagccatctt

SEQ ID NO: 3538 - DNA, 44 bp, synthetic construct
  misc_feature 1..44: note = oligonucleotide decoy
  source 1..44: mol_type = other DNA
caccgatgttacatcacgtgtaaataaacaggtggagccatctt

SEQ ID NO: 3539 - DNA, 44 bp, synthetic construct
  misc_feature 1..44: note = oligonucleotide decoy
  source 1..44: mol_type = other DNA
caccgatgttacgtcacgtgtaaacaaacaggtggagccatctt

SEQ ID NO: 3540 - DNA, 44 bp, synthetic construct
  misc_feature 1..44: note = oligonucleotide decoy
  source 1..44: mol_type = other DNA
caccgatgttacgtcacgtgtaaataaacaggtggagccatctt

SEQ ID NO: 3541 - DNA, 44 bp, synthetic construct
  misc_feature 1..44: note = oligonucleotide decoy
  source 1..44: mol_type = other DNA
caccgatgttatatcacgtgtaaacaaacaggtggagccatctt

SEQ ID NO: 3542 - DNA, 44 bp, synthetic construct
  misc_feature 1..44: note = oligonucleotide decoy
  source 1..44: mol_type = other DNA
caccgatgttatatcacgtgtaaataaacaggtggagccatctt

SEQ ID NO: 3543 - DNA, 44 bp, synthetic construct
  misc_feature 1..44: note = oligonucleotide decoy
  source 1..44: mol_type = other DNA
caccgatgttatgtcacgtgtaaacaaacaggtggagccatctt

SEQ ID NO: 3544 - DNA, 44 bp, synthetic construct
  misc_feature 1..44: note = oligonucleotide decoy
  source 1..44: mol_type = other DNA
caccgatgttatgtcacgtgtaaataaacaggtggagccatctt

SEQ ID NO: 3545 - DNA, 44 bp, synthetic construct
  misc_feature 1..44: note = oligonucleotide decoy
  source 1..44: mol_type = other DNA
caccgctgttacatcacgtgtaaacaaacaggtggagccatctt

SEQ ID NO: 3546 - DNA, 44 bp, synthetic construct
  misc_feature 1..44: note = oligonucleotide decoy
  source 1..44: mol_type = other DNA
caccgctgttacatcacgtgtaaataaacaggtggagccatctt

SEQ ID NO: 3547 - DNA, 44 bp, synthetic construct
  misc_feature 1..44: note = oligonucleotide decoy
  source 1..44: mol_type = other DNA
caccgctgttacgtcacgtgtaaacaaacaggtggagccatctt

SEQ ID NO: 3548 - DNA, 44 bp, synthetic construct
  misc_feature 1..44: note = oligonucleotide decoy
  source 1..44: mol_type = other DNA
caccgctgttacgtcacgtgtaaataaacaggtggagccatctt

SEQ ID NO: 3549 - DNA, 44 bp, synthetic construct
  misc_feature 1..44: note = oligonucleotide decoy
  source 1..44: mol_type = other DNA
caccgctgttatatcacgtgtaaacaaacaggtggagccatctt

SEQ ID NO: 3550 - DNA, 44 bp, synthetic construct
  misc_feature 1..44: note = oligonucleotide decoy
  source 1..44: mol_type = other DNA
caccgctgttatatcacgtgtaaataaacaggtggagccatctt

SEQ ID NO: 3551 - DNA, 44 bp, synthetic construct
  misc_feature 1..44: note = oligonucleotide decoy
  source 1..44: mol_type = other DNA
caccgctgttatgtcacgtgtaaacaaacaggtggagccatctt

SEQ ID NO: 3552 - DNA, 44 bp, synthetic construct
  misc_feature 1..44: note = oligonucleotide decoy
  source 1..44: mol_type = other DNA
caccgctgttatgtcacgtgtaaataaacaggtggagccatctt

SEQ ID NO: 3553 - DNA, 44 bp, synthetic construct
  misc_feature 1..44: note = oligonucleotide decoy
  source 1..44: mol_type = other DNA
caccggtgttacatcacgtgtaaacaaacaggtggagccatctt

SEQ ID NO: 3554 - DNA, 44 bp, synthetic construct
  misc_feature 1..44: note = oligonucleotide decoy
  source 1..44: mol_type = other DNA
caccggtgttacatcacgtgtaaataaacaggtggagccatctt

SEQ ID NO: 3555 - DNA, 44 bp, synthetic construct
  misc_feature 1..44: note = oligonucleotide decoy
  source 1..44: mol_type = other DNA
caccggtgttacgtcacgtgtaaacaaacaggtggagccatctt

SEQ ID NO: 3556 - DNA, 44 bp, synthetic construct
  misc_feature 1..44: note = oligonucleotide decoy
  source 1..44: mol_type = other DNA
caccggtgttacgtcacgtgtaaataaacaggtggagccatctt

SEQ ID NO: 3557 - DNA, 44 bp, synthetic construct
  misc_feature 1..44: note = oligonucleotide decoy
  source 1..44: mol_type = other DNA
caccggtgttatatcacgtgtaaacaaacaggtggagccatctt

SEQ ID NO: 3558 - DNA, 44 bp, synthetic construct
  misc_feature 1..44: note = oligonucleotide decoy
  source 1..44: mol_type = other DNA
caccggtgttatatcacgtgtaaataaacaggtggagccatctt

SEQ ID NO: 3559 - DNA, 44 bp, synthetic construct
  misc_feature 1..44: note = oligonucleotide decoy
  source 1..44: mol_type = other DNA
caccggtgttatgtcacgtgtaaacaaacaggtggagccatctt

SEQ ID NO: 3560 - DNA, 44 bp, synthetic construct
  misc_feature 1..44: note = oligonucleotide decoy
  source 1..44: mol_type = other DNA
caccggtgttatgtcacgtgtaaataaacaggtggagccatctt

SEQ ID NO: 3561 - DNA, 44 bp, synthetic construct
  misc_feature 1..44: note = oligonucleotide decoy
  source 1..44: mol_type = other DNA
caccgttgttacatcacgtgtaaacaaacaggtggagccatctt

SEQ ID NO: 3562 - DNA, 44 bp, synthetic construct
  misc_feature 1..44: note = oligonucleotide decoy
  source 1..44: mol_type = other DNA
caccgttgttacatcacgtgtaaataaacaggtggagccatctt

SEQ ID NO: 3563 - DNA, 44 bp, synthetic construct
  misc_feature 1..44: note = oligonucleotide decoy
  source 1..44: mol_type = other DNA
caccgttgttacgtcacgtgtaaacaaacaggtggagccatctt

SEQ ID NO: 3564 - DNA, 44 bp, synthetic construct
  misc_feature 1..44: note = oligonucleotide decoy
  source 1..44: mol_type = other DNA
caccgttgttacgtcacgtgtaaataaacaggtggagccatctt

SEQ ID NO: 3565 - DNA, 44 bp, synthetic construct
  misc_feature 1..44: note = oligonucleotide decoy
  source 1..44: mol_type = other DNA
caccgttgttatatcacgtgtaaacaaacaggtggagccatctt

SEQ ID NO: 3566 - DNA, 44 bp, synthetic construct
  misc_feature 1..44: note = oligonucleotide decoy
  source 1..44: mol_type = other DNA
caccgttgttatatcacgtgtaaataaacaggtggagccatctt

SEQ ID NO: 3567 - DNA, 44 bp, synthetic construct
  misc_feature 1..44: note = oligonucleotide decoy
  source 1..44: mol_type = other DNA
caccgttgttatgtcacgtgtaaacaaacaggtggagccatctt

SEQ ID NO: 3568 - DNA, 44 bp, synthetic construct
  misc_feature 1..44: note = oligonucleotide decoy
  source 1..44: mol_type = other DNA
caccgttgttatgtcacgtgtaaataaacaggtggagccatctt

SEQ ID NO: 3569 - DNA, 44 bp, synthetic construct
  misc_feature 1..44: note = oligonucleotide decoy
  source 1..44: mol_type = other DNA
cagcgatgttacatcacgtgtaaacaaacaggtggagccatctt

SEQ ID NO: 3570 - DNA, 44 bp, synthetic construct
  misc_feature 1..44: note = oligonucleotide decoy
  source 1..44: mol_type = other DNA
cagcgatgttacatcacgtgtaaataaacaggtggagccatctt

SEQ ID NO: 3571 - DNA, 44 bp, synthetic construct
  misc_feature 1..44: note = oligonucleotide decoy
  source 1..44: mol_type = other DNA
cagcgatgttacgtcacgtgtaaacaaacaggtggagccatctt

SEQ ID NO: 3572 - DNA, 44 bp, synthetic construct
  misc_feature 1..44: note = oligonucleotide decoy
  source 1..44: mol_type = other DNA
cagcgatgttacgtcacgtgtaaataaacaggtggagccatctt

SEQ ID NO: 3573 - DNA, 44 bp, synthetic construct
  misc_feature 1..44: note = oligonucleotide decoy
  source 1..44: mol_type = other DNA
cagcgatgttatatcacgtgtaaacaaacaggtggagccatctt

SEQ ID NO: 3574 - DNA, 44 bp, synthetic construct
  misc_feature 1..44: note = oligonucleotide decoy
  source 1..44: mol_type = other DNA
cagcgatgttatatcacgtgtaaataaacaggtggagccatctt

SEQ ID NO: 3575 - DNA, 44 bp, synthetic construct
  misc_feature 1..44: note = oligonucleotide decoy
  source 1..44: mol_type = other DNA
cagcgatgttatgtcacgtgtaaacaaacaggtggagccatctt

SEQ ID NO: 3576 - DNA, 44 bp, synthetic construct
  misc_feature 1..44: note = oligonucleotide decoy
  source 1..44: mol_type = other DNA
cagcgatgttatgtcacgtgtaaataaacaggtggagccatctt

SEQ ID NO: 3577 - DNA, 44 bp, synthetic construct
  misc_feature 1..44: note = oligonucleotide decoy
  source 1..44: mol_type = other DNA
cagcgctgttacatcacgtgtaaacaaacaggtggagccatctt

SEQ ID NO: 3578 - DNA, 44 bp, synthetic construct
  misc_feature 1..44: note = oligonucleotide decoy
  source 1..44: mol_type = other DNA
cagcgctgttacatcacgtgtaaataaacaggtggagccatctt

SEQ ID NO: 3579 - DNA, 44 bp, synthetic construct
  misc_feature 1..44: note = oligonucleotide decoy
  source 1..44: mol_type = other DNA
cagcgctgttacgtcacgtgtaaacaaacaggtggagccatctt

SEQ ID NO: 3580 - DNA, 44 bp, synthetic construct
  misc_feature 1..44: note = oligonucleotide decoy
  source 1..44: mol_type = other DNA
cagcgctgttacgtcacgtgtaaataaacaggtggagccatctt

SEQ ID NO: 3581 - DNA, 44 bp, synthetic construct
  misc_feature 1..44: note = oligonucleotide decoy
  source 1..44: mol_type = other DNA
cagcgctgttatatcacgtgtaaacaaacaggtggagccatctt

SEQ ID NO: 3582 - DNA, 44 bp, synthetic construct
  misc_feature 1..44: note = oligonucleotide decoy
  source 1..44: mol_type = other DNA
cagcgctgttatatcacgtgtaaataaacaggtggagccatctt

SEQ ID NO: 3583 - DNA, 44 bp, synthetic construct
  misc_feature 1..44: note = oligonucleotide decoy
  source 1..44: mol_type = other DNA
cagcgctgttatgtcacgtgtaaacaaacaggtggagccatctt

SEQ ID NO: 3584 - DNA, 44 bp, synthetic construct
  misc_feature 1..44: note = oligonucleotide decoy
  source 1..44: mol_type = other DNA
cagcgctgttatgtcacgtgtaaataaacaggtggagccatctt

SEQ ID NO: 3585 - DNA, 44 bp, synthetic construct
  misc_feature 1..44: note = oligonucleotide decoy
  source 1..44: mol_type = other DNA
cagcggtgttacatcacgtgtaaacaaacaggtggagccatctt

SEQ ID NO: 3586 - DNA, 44 bp, synthetic construct
  misc_feature 1..44: note = oligonucleotide decoy
  source 1..44: mol_type = other DNA
cagcggtgttacatcacgtgtaaataaacaggtggagccatctt

SEQ ID NO: 3587 - DNA, 44 bp, synthetic construct
  misc_feature 1..44: note = oligonucleotide decoy
  source 1..44: mol_type = other DNA
cagcggtgttacgtcacgtgtaaacaaacaggtggagccatctt

SEQ ID NO: 3588 - DNA, 44 bp, synthetic construct
  misc_feature 1..44: note = oligonucleotide decoy
  source 1..44: mol_type = other DNA
cagcggtgttacgtcacgtgtaaataaacaggtggagccatctt

SEQ ID NO: 3589 - DNA, 44 bp, synthetic construct
  misc_feature 1..44: note = oligonucleotide decoy
  source 1..44: mol_type = other DNA
cagcggtgttatatcacgtgtaaacaaacaggtggagccatctt

SEQ ID NO: 3590 - DNA, 44 bp, synthetic construct
  misc_feature 1..44: note = oligonucleotide decoy
  source 1..44: mol_type = other DNA
cagcggtgttatatcacgtgtaaataaacaggtggagccatctt

SEQ ID NO: 3591 - DNA, 44 bp, synthetic construct
  misc_feature 1..44: note = oligonucleotide decoy
  source 1..44: mol_type = other DNA
cagcggtgttatgtcacgtgtaaacaaacaggtggagccatctt

SEQ ID NO: 3592 - DNA, 44 bp, synthetic construct
  misc_feature 1..44: note = oligonucleotide decoy
  source 1..44: mol_type = other DNA
cagcggtgttatgtcacgtgtaaataaacaggtggagccatctt

SEQ ID NO: 3593 - DNA, 44 bp, synthetic construct
  misc_feature 1..44: note = oligonucleotide decoy
  source 1..44: mol_type = other DNA
cagcgttgttacatcacgtgtaaacaaacaggtggagccatctt

SEQ ID NO: 3594 - DNA, 44 bp, synthetic construct
  misc_feature 1..44: note = oligonucleotide decoy
  source 1..44: mol_type = other DNA
cagcgttgttacatcacgtgtaaataaacaggtggagccatctt

SEQ ID NO: 3595 - DNA, 44 bp, synthetic construct
  misc_feature 1..44: note = oligonucleotide decoy
  source 1..44: mol_type = other DNA
cagcgttgttacgtcacgtgtaaacaaacaggtggagccatctt

SEQ ID NO: 3596 - DNA, 44 bp, synthetic construct
  misc_feature 1..44: note = oligonucleotide decoy
  source 1..44: mol_type = other DNA
cagcgttgttacgtcacgtgtaaataaacaggtggagccatctt

SEQ ID NO: 3597 - DNA, 44 bp, synthetic construct
  misc_feature 1..44: note = oligonucleotide decoy
  source 1..44: mol_type = other DNA
cagcgttgttatatcacgtgtaaacaaacaggtggagccatctt

SEQ ID NO: 3598 - DNA, 44 bp, synthetic construct
  misc_feature 1..44: note = oligonucleotide decoy
  source 1..44: mol_type = other DNA
cagcgttgttatatcacgtgtaaataaacaggtggagccatctt

SEQ ID NO: 3599 - DNA, 44 bp, synthetic construct
  misc_feature 1..44: note = oligonucleotide decoy
  source 1..44: mol_type = other DNA
cagcgttgttatgtcacgtgtaaacaaacaggtggagccatctt

SEQ ID NO: 3600 - DNA, 44 bp, synthetic construct
  misc_feature 1..44: note = oligonucleotide decoy
  source 1..44: mol_type = other DNA
cagcgttgttatgtcacgtgtaaataaacaggtggagccatctt

SEQ ID NO: 3601 - DNA, 44 bp, synthetic construct
  misc_feature 1..44: note = oligonucleotide decoy
  source 1..44: mol_type = other DNA
catcgatgttacatcacgtgtaaacaaacaggtggagccatctt

SEQ ID NO: 3602 - DNA, 44 bp, synthetic construct
  misc_feature 1..44: note = oligonucleotide decoy
  source 1..44: mol_type = other DNA
catcgatgttacatcacgtgtaaataaacaggtggagccatctt

SEQ ID NO: 3603 - DNA, 44 bp, synthetic construct
  misc_feature 1..44: note = oligonucleotide decoy
  source 1..44: mol_type = other DNA
catcgatgttacgtcacgtgtaaacaaacaggtggagccatctt

SEQ ID NO: 3604 - DNA, 44 bp, synthetic construct
  misc_feature 1..44: note = oligonucleotide decoy
  source 1..44: mol_type = other DNA
catcgatgttacgtcacgtgtaaataaacaggtggagccatctt

SEQ ID NO: 3605 - DNA, 44 bp, synthetic construct
  misc_feature 1..44: note = oligonucleotide decoy
  source 1..44: mol_type = other DNA
catcgatgttatatcacgtgtaaacaaacaggtggagccatctt

SEQ ID NO: 3606 - DNA, 44 bp, synthetic construct
  misc_feature 1..44: note = oligonucleotide decoy
  source 1..44: mol_type = other DNA
catcgatgttatatcacgtgtaaataaacaggtggagccatctt

SEQ ID NO: 3607 - DNA, 44 bp, synthetic construct
  misc_feature 1..44: note = oligonucleotide decoy
  source 1..44: mol_type = other DNA
catcgatgttatgtcacgtgtaaacaaacaggtggagccatctt

SEQ ID NO: 3608 - DNA, 44 bp, synthetic construct
  misc_feature 1..44: note = oligonucleotide decoy
  source 1..44: mol_type = other DNA
catcgatgttatgtcacgtgtaaataaacaggtggagccatctt

SEQ ID NO: 3609 - DNA, 44 bp, synthetic construct
  misc_feature 1..44: note = oligonucleotide decoy
  source 1..44: mol_type = other DNA
catcgctgttacatcacgtgtaaacaaacaggtggagccatctt

SEQ ID NO: 3610 - DNA, 44 bp, synthetic construct
  misc_feature 1..44: note = oligonucleotide decoy
  source 1..44: mol_type = other DNA
catcgctgttacatcacgtgtaaataaacaggtggagccatctt

SEQ ID NO: 3611 - DNA, 44 bp, synthetic construct
  misc_feature 1..44: note = oligonucleotide decoy
  source 1..44: mol_type = other DNA
catcgctgttacgtcacgtgtaaacaaacaggtggagccatctt

SEQ ID NO: 3612 - DNA, 44 bp, synthetic construct
  misc_feature 1..44: note = oligonucleotide decoy
  source 1..44: mol_type = other DNA
catcgctgttacgtcacgtgtaaataaacaggtggagccatctt

SEQ ID NO: 3613 - DNA, 44 bp, synthetic construct
  misc_feature 1..44: note = oligonucleotide decoy
  source 1..44: mol_type = other DNA
catcgctgttatatcacgtgtaaacaaacaggtggagccatctt

SEQ ID NO: 3614 - DNA, 44 bp, synthetic construct
  misc_feature 1..44: note = oligonucleotide decoy
  source 1..44: mol_type = other DNA
catcgctgttatatcacgtgtaaataaacaggtggagccatctt

SEQ ID NO: 3615 - DNA, 44 bp, synthetic construct
  misc_feature 1..44: note = oligonucleotide decoy
  source 1..44: mol_type = other DNA
catcgctgttatgtcacgtgtaaacaaacaggtggagccatctt

SEQ ID NO: 3616 - DNA, 44 bp, synthetic construct
  misc_feature 1..44: note = oligonucleotide decoy
  source 1..44: mol_type = other DNA
catcgctgttatgtcacgtgtaaataaacaggtggagccatctt

SEQ ID NO: 3617 - DNA, 44 bp, synthetic construct
  misc_feature 1..44: note = oligonucleotide decoy
  source 1..44: mol_type = other DNA
catcggtgttacatcacgtgtaaacaaacaggtggagccatctt

SEQ ID NO: 3618 - DNA, 44 bp, synthetic construct
  misc_feature 1..44: note = oligonucleotide decoy
  source 1..44: mol_type = other DNA
catcggtgttacatcacgtgtaaataaacaggtggagccatctt

SEQ ID NO: 3619 - DNA, 44 bp, synthetic construct
  misc_feature 1..44: note = oligonucleotide decoy
  source 1..44: mol_type = other DNA
catcggtgttacgtcacgtgtaaacaaacaggtggagccatctt

SEQ ID NO: 3620 - DNA, 44 bp, synthetic construct
  misc_feature 1..44: note = oligonucleotide decoy
  source 1..44: mol_type = other DNA
catcggtgttacgtcacgtgtaaataaacaggtggagccatctt

SEQ ID NO: 3621 - DNA, 44 bp, synthetic construct
  misc_feature 1..44: note = oligonucleotide decoy
  source 1..44: mol_type = other DNA
catcggtgttatatcacgtgtaaacaaacaggtggagccatctt

SEQ ID NO: 3622 - DNA, 44 bp, synthetic construct
  misc_feature 1..44: note = oligonucleotide decoy
  source 1..44: mol_type = other DNA
catcggtgttatatcacgtgtaaataaacaggtggagccatctt

SEQ ID NO: 3623 - DNA, 44 bp, synthetic construct
  misc_feature 1..44: note = oligonucleotide decoy
  source 1..44: mol_type = other DNA
catcggtgttatgtcacgtgtaaacaaacaggtggagccatctt

SEQ ID NO: 3624 - DNA, 44 bp, synthetic construct
  misc_feature 1..44: note = oligonucleotide decoy
  source 1..44: mol_type = other DNA
catcggtgttatgtcacgtgtaaataaacaggtggagccatctt

SEQ ID NO: 3625 - DNA, 44 bp, synthetic construct
  misc_feature 1..44: note = oligonucleotide decoy
  source 1..44: mol_type = other DNA
catcgttgttacatcacgtgtaaacaaacaggtggagccatctt

SEQ ID NO: 3626 - DNA, 44 bp, synthetic construct
  misc_feature 1..44: note = oligonucleotide decoy
  source 1..44: mol_type = other DNA
catcgttgttacatcacgtgtaaataaacaggtggagccatctt

SEQ ID NO: 3627 - DNA, 44 bp, synthetic construct
  misc_feature 1..44: note = oligonucleotide decoy
  source 1..44: mol_type = other DNA
catcgttgttacgtcacgtgtaaacaaacaggtggagccatctt

SEQ ID NO: 3628 - DNA, 44 bp, synthetic construct
  misc_feature 1..44: note = oligonucleotide decoy
  source 1..44: mol_type = other DNA
catcgttgttacgtcacgtgtaaataaacaggtggagccatctt

SEQ ID NO: 3629 - DNA, 44 bp, synthetic construct
  misc_feature 1..44: note = oligonucleotide decoy
  source 1..44: mol_type = other DNA
catcgttgttatatcacgtgtaaacaaacaggtggagccatctt

SEQ ID NO: 3630 - DNA, 44 bp, synthetic construct
  misc_feature 1..44: note = oligonucleotide decoy
  source 1..44: mol_type = other DNA
catcgttgttatatcacgtgtaaataaacaggtggagccatctt

SEQ ID NO: 3631 - DNA, 44 bp, synthetic construct
  misc_feature 1..44: note = oligonucleotide decoy
  source 1..44: mol_type = other DNA
catcgttgttatgtcacgtgtaaacaaacaggtggagccatctt

SEQ ID NO: 3632 - DNA, 44 bp, synthetic construct
  misc_feature 1..44: note = oligonucleotide decoy
  source 1..44: mol_type = other DNA
catcgttgttatgtcacgtgtaaataaacaggtggagccatctt

SEQ ID NO: 3633 - DNA, 44 bp, synthetic construct
  misc_feature 1..44: note = oligonucleotide decoy
  source 1..44: mol_type = other DNA
caacgatgttacatcacgtgtaaacaaacaggtggagccatttt

SEQ ID NO: 3634 - DNA, 44 bp, synthetic construct
  misc_feature 1..44: note = oligonucleotide decoy
  source 1..44: mol_type = other DNA
caacgatgttacatcacgtgtaaataaacaggtggagccatttt

SEQ ID NO: 3635 - DNA, 44 bp, synthetic construct
  misc_feature 1..44: note = oligonucleotide decoy
  source 1..44: mol_type = other DNA
caacgatgttacgtcacgtgtaaacaaacaggtggagccatttt

SEQ ID NO: 3636 - DNA, 44 bp, synthetic construct
  misc_feature 1..44: note = oligonucleotide decoy
  source 1..44: mol_type = other DNA
caacgatgttacgtcacgtgtaaataaacaggtggagccatttt

SEQ ID NO: 3637 - DNA, 44 bp, synthetic construct
  misc_feature 1..44: note = oligonucleotide decoy
  source 1..44: mol_type = other DNA
caacgatgttatatcacgtgtaaacaaacaggtggagccatttt

SEQ ID NO: 3638 - DNA, 44 bp, synthetic construct
  misc_feature 1..44: note = oligonucleotide decoy
  source 1..44: mol_type = other DNA
caacgatgttatatcacgtgtaaataaacaggtggagccatttt

SEQ ID NO: 3639 - DNA, 44 bp, synthetic construct
  misc_feature 1..44: note = oligonucleotide decoy
  source 1..44: mol_type = other DNA
caacgatgttatgtcacgtgtaaacaaacaggtggagccatttt

SEQ ID NO: 3640 - DNA, 44 bp, synthetic construct
  misc_feature 1..44: note = oligonucleotide decoy
  source 1..44: mol_type = other DNA
caacgatgttatgtcacgtgtaaataaacaggtggagccatttt

SEQ ID NO: 3641 - DNA, 44 bp, synthetic construct
  misc_feature 1..44: note = oligonucleotide decoy
  source 1..44: mol_type = other DNA
caacgctgttacatcacgtgtaaacaaacaggtggagccatttt

SEQ ID NO: 3642 - DNA, 44 bp, synthetic construct
  misc_feature 1..44: note = oligonucleotide decoy
  source 1..44: mol_type = other DNA
caacgctgttacatcacgtgtaaataaacaggtggagccatttt

SEQ ID NO: 3643 - DNA, 44 bp, synthetic construct
  misc_feature 1..44: note = oligonucleotide decoy
  source 1..44: mol_type = other DNA
caacgctgttacgtcacgtgtaaacaaacaggtggagccatttt

SEQ ID NO: 3644 - DNA, 44 bp, synthetic construct
  misc_feature 1..44: note = oligonucleotide decoy
  source 1..44: mol_type = other DNA
caacgctgttacgtcacgtgtaaataaacaggtggagccatttt

SEQ ID NO: 3645 - DNA, 44 bp, synthetic construct
  misc_feature 1..44: note = oligonucleotide decoy
  source 1..44: mol_type = other DNA
caacgctgttatatcacgtgtaaacaaacaggtggagccatttt

SEQ ID NO: 3646 - DNA, 44 bp, synthetic construct
  misc_feature 1..44: note = oligonucleotide decoy
  source 1..44: mol_type = other DNA
caacgctgttatatcacgtgtaaataaacaggtggagccatttt

SEQ ID NO: 3647 - DNA, 44 bp, synthetic construct
  misc_feature 1..44: note = oligonucleotide decoy
  source 1..44: mol_type = other DNA
caacgctgttatgtcacgtgtaaacaaacaggtggagccatttt

SEQ ID NO: 3648 - DNA, 44 bp, synthetic construct
  misc_feature 1..44: note = oligonucleotide decoy
  source 1..44: mol_type = other DNA
caacgctgttatgtcacgtgtaaataaacaggtggagccatttt

SEQ ID NO: 3649 - DNA, 44 bp, synthetic construct
  misc_feature 1..44: note = oligonucleotide decoy
  source 1..44: mol_type = other DNA
caacggtgttacatcacgtgtaaacaaacaggtggagccatttt

SEQ ID NO: 3650 - DNA, 44 bp, synthetic construct
  misc_feature 1..44: note = oligonucleotide decoy
  source 1..44: mol_type = other DNA
caacggtgttacatcacgtgtaaataaacaggtggagccatttt

SEQ ID NO: 3651 - DNA, 44 bp, synthetic construct
  misc_feature 1..44: note = oligonucleotide decoy
  source 1..44: mol_type = other DNA
caacggtgttacgtcacgtgtaaacaaacaggtggagccatttt

SEQ ID NO: 3652 - DNA, 44 bp, synthetic construct
  misc_feature 1..44: note = oligonucleotide decoy
  source 1..44: mol_type = other DNA
caacggtgttacgtcacgtgtaaataaacaggtggagccatttt

SEQ ID NO: 3653 - DNA, 44 bp, synthetic construct
  misc_feature 1..44: note = oligonucleotide decoy
  source 1..44: mol_type = other DNA
caacggtgttatatcacgtgtaaacaaacaggtggagccatttt

SEQ ID NO: 3654 - DNA, 44 bp, synthetic construct
  misc_feature 1..44: note = oligonucleotide decoy
  source 1..44: mol_type = other DNA
caacggtgttatatcacgtgtaaataaacaggtggagccatttt

SEQ ID NO: 3655 - DNA, 44 bp, synthetic construct
  misc_feature 1..44: note = oligonucleotide decoy
  source 1..44: mol_type = other DNA
caacggtgttatgtcacgtgtaaacaaacaggtggagccatttt

SEQ ID NO: 3656 - DNA, 44 bp, synthetic construct
  misc_feature 1..44: note = oligonucleotide decoy
  source 1..44: mol_type = other DNA
caacggtgttatgtcacgtgtaaataaacaggtggagccatttt

SEQ ID NO: 3657 - DNA, 44 bp, synthetic construct
  misc_feature 1..44: note = oligonucleotide decoy
  source 1..44: mol_type = other DNA
caacgttgttacatcacgtgtaaacaaacaggtggagccatttt

SEQ ID NO: 3658 - DNA, 44 bp, synthetic construct
  misc_feature 1..44: note = oligonucleotide decoy
  source 1..44: mol_type = other DNA
caacgttgttacatcacgtgtaaataaacaggtggagccatttt

SEQ ID NO: 3659 - DNA, 44 bp, synthetic construct
  misc_feature 1..44: note = oligonucleotide decoy
  source 1..44: mol_type = other DNA
caacgttgttacgtcacgtgtaaacaaacaggtggagccatttt

SEQ ID NO: 3660 - DNA, 44 bp, synthetic construct
  misc_feature 1..44: note = oligonucleotide decoy
  source 1..44: mol_type = other DNA
caacgttgttacgtcacgtgtaaataaacaggtggagccatttt

SEQ ID NO: 3661 - DNA, 44 bp, synthetic construct
  misc_feature 1..44: note = oligonucleotide decoy
  source 1..44: mol_type = other DNA
caacgttgttatatcacgtgtaaacaaacaggtggagccatttt

SEQ ID NO: 3662 - DNA, 44 bp, synthetic construct
  misc_feature 1..44: note = oligonucleotide decoy
  source 1..44: mol_type = other DNA
caacgttgttatatcacgtgtaaataaacaggtggagccatttt

SEQ ID NO: 3663 - DNA, 44 bp, synthetic construct
  misc_feature 1..44: note = oligonucleotide decoy
  source 1..44: mol_type = other DNA
caacgttgttatgtcacgtgtaaacaaacaggtggagccatttt

SEQ ID NO: 3664 - DNA, 44 bp, synthetic construct
  misc_feature 1..44: note = oligonucleotide decoy
  source 1..44: mol_type = other DNA
caacgttgttatgtcacgtgtaaataaacaggtggagccatttt

SEQ ID NO: 3665 - DNA, 44 bp, synthetic construct
  misc_feature 1..44: note = oligonucleotide decoy
  source 1..44: mol_type = other DNA
caccgatgttacatcacgtgtaaacaaacaggtggagccatttt

SEQ ID NO: 3666 - DNA, 44 bp, synthetic construct
  misc_feature 1..44: note = oligonucleotide decoy
  source 1..44: mol_type = other DNA
caccgatgttacatcacgtgtaaataaacaggtggagccatttt

SEQ ID NO: 3667 - DNA, 44 bp, synthetic construct
  misc_feature 1..44: note = oligonucleotide decoy
  source 1..44: mol_type = other DNA
caccgatgttacgtcacgtgtaaacaaacaggtggagccatttt

SEQ ID NO: 3668 - DNA, 44 bp, synthetic construct
  misc_feature 1..44: note = oligonucleotide decoy
  source 1..44: mol_type = other DNA
caccgatgttacgtcacgtgtaaataaacaggtggagccatttt

SEQ ID NO: 3669 - DNA, 44 bp, synthetic construct
  misc_feature 1..44: note = oligonucleotide decoy
  source 1..44: mol_type = other DNA
caccgatgttatatcacgtgtaaacaaacaggtggagccatttt

SEQ ID NO: 3670 - DNA, 44 bp, synthetic construct
  misc_feature 1..44: note = oligonucleotide decoy
  source 1..44: mol_type = other DNA
caccgatgttatatcacgtgtaaataaacaggtggagccatttt

SEQ ID NO: 3671 - DNA, 44 bp, synthetic construct
  misc_feature 1..44: note = oligonucleotide decoy
  source 1..44: mol_type = other DNA
caccgatgttatgtcacgtgtaaacaaacaggtggagccatttt

SEQ ID NO: 3672 - DNA, 44 bp, synthetic construct
  misc_feature 1..44: note = oligonucleotide decoy
  source 1..44: mol_type = other DNA
caccgatgttatgtcacgtgtaaataaacaggtggagccatttt

SEQ ID NO: 3673 - DNA, 44 bp, synthetic construct
  misc_feature 1..44: note = oligonucleotide decoy
  source 1..44: mol_type = other DNA
caccgctgttacatcacgtgtaaacaaacaggtggagccatttt

SEQ ID NO: 3674 - DNA, 44 bp, synthetic construct
  misc_feature 1..44: note = oligonucleotide decoy
  source 1..44: mol_type = other DNA
caccgctgttacatcacgtgtaaataaacaggtggagccatttt

SEQ ID NO: 3675 - DNA, 44 bp, synthetic construct
  misc_feature 1..44: note = oligonucleotide decoy
  source 1..44: mol_type = other DNA
caccgctgttacgtcacgtgtaaacaaacaggtggagccatttt

SEQ ID NO: 3676 - DNA, 44 bp, synthetic construct
  misc_feature 1..44: note = oligonucleotide decoy
  source 1..44: mol_type = other DNA
caccgctgttacgtcacgtgtaaataaacaggtggagccatttt

SEQ ID NO: 3677 - DNA, 44 bp, synthetic construct
  misc_feature 1..44: note = oligonucleotide decoy
  source 1..44: mol_type = other DNA
caccgctgttatatcacgtgtaaacaaacaggtggagccatttt

SEQ ID NO: 3678 - DNA, 44 bp, synthetic construct
  misc_feature 1..44: note = oligonucleotide decoy
  source 1..44: mol_type = other DNA
caccgctgttatatcacgtgtaaataaacaggtggagccatttt

SEQ ID NO: 3679 - DNA, 44 bp, synthetic construct
  misc_feature 1..44: note = oligonucleotide decoy
  source 1..44: mol_type = other DNA
caccgctgttatgtcacgtgtaaacaaacaggtggagccatttt

SEQ ID NO: 3680 - DNA, 44 bp, synthetic construct
  misc_feature 1..44: note = oligonucleotide decoy
  source 1..44: mol_type = other DNA
caccgctgttatgtcacgtgtaaataaacaggtggagccatttt

SEQ ID NO: 3681 - DNA, 44 bp, synthetic construct
  misc_feature 1..44: note = oligonucleotide decoy
  source 1..44: mol_type = other DNA
caccggtgttacatcacgtgtaaacaaacaggtggagccatttt

SEQ ID NO: 3682 - DNA, 44 bp, synthetic construct
  misc_feature 1..44: note = oligonucleotide decoy
  source 1..44: mol_type = other DNA
caccggtgttacatcacgtgtaaataaacaggtggagccatttt

SEQ ID NO: 3683 - DNA, 44 bp, synthetic construct
  misc_feature 1..44: note = oligonucleotide decoy
  source 1..44: mol_type = other DNA
caccggtgttacgtcacgtgtaaacaaacaggtggagccatttt

SEQ ID NO: 3684 - DNA, 44 bp, synthetic construct
  misc_feature 1..44: note = oligonucleotide decoy
  source 1..44: mol_type = other DNA
caccggtgttacgtcacgtgtaaataaacaggtggagccatttt

SEQ ID NO: 3685 - DNA, 44 bp, synthetic construct
  misc_feature 1..44: note = oligonucleotide decoy
  source 1..44: mol_type = other DNA
caccggtgttatatcacgtgtaaacaaacaggtggagccatttt

SEQ ID NO: 3686 - DNA, 44 bp, synthetic construct
  misc_feature 1..44: note = oligonucleotide decoy
  source 1..44: mol_type = other DNA
caccggtgttatatcacgtgtaaataaacaggtggagccatttt

SEQ ID NO: 3687 - DNA, 44 bp, synthetic construct
  misc_feature 1..44: note = oligonucleotide decoy
  source 1..44: mol_type = other DNA
caccggtgttatgtcacgtgtaaacaaacaggtggagccatttt

SEQ ID NO: 3688 - DNA, 44 bp, synthetic construct
  misc_feature 1..44: note = oligonucleotide decoy
  source 1..44: mol_type = other DNA
caccggtgttatgtcacgtgtaaataaacaggtggagccatttt

SEQ ID NO: 3689 - DNA, 44 bp, synthetic construct
  misc_feature 1..44: note = oligonucleotide decoy
  source 1..44: mol_type = other DNA
caccgttgttacatcacgtgtaaacaaacaggtggagccatttt

SEQ ID NO: 3690 - DNA, 44 bp, synthetic construct
  misc_feature 1..44: note = oligonucleotide decoy
  source 1..44: mol_type = other DNA
caccgttgttacatcacgtgtaaataaacaggtggagccatttt

SEQ ID NO: 3691 - DNA, 44 bp, synthetic construct
  misc_feature 1..44: note = oligonucleotide decoy
  source 1..44: mol_type = other DNA
caccgttgttacgtcacgtgtaaacaaacaggtggagccatttt

SEQ ID NO: 3692 - DNA, 44 bp, synthetic construct
  misc_feature 1..44: note = oligonucleotide decoy
  source 1..44: mol_type = other DNA
caccgttgttacgtcacgtgtaaataaacaggtggagccatttt

SEQ ID NO: 3693 - DNA, 44 bp, synthetic construct
  misc_feature 1..44: note = oligonucleotide decoy
  source 1..44: mol_type = other DNA
caccgttgttatatcacgtgtaaacaaacaggtggagccatttt

SEQ ID NO: 3694 - DNA, 44 bp, synthetic construct
  misc_feature 1..44: note = oligonucleotide decoy
  source 1..44: mol_type = other DNA
caccgttgttatatcacgtgtaaataaacaggtggagccatttt

SEQ ID NO: 3695 - DNA, 44 bp, synthetic construct
  misc_feature 1..44: note = oligonucleotide decoy
  source 1..44: mol_type = other DNA
caccgttgttatgtcacgtgtaaacaaacaggtggagccatttt

SEQ ID NO: 3696 - DNA, 44 bp, synthetic construct
  misc_feature 1..44: note = oligonucleotide decoy
  source 1..44: mol_type = other DNA
caccgttgttatgtcacgtgtaaataaacaggtggagccatttt

SEQ ID NO: 3697 - DNA, 44 bp, synthetic construct
  misc_feature 1..44: note = oligonucleotide decoy
  source 1..44: mol_type = other DNA
cagcgatgttacatcacgtgtaaacaaacaggtggagccatttt

SEQ ID NO: 3698 - DNA, 44 bp, synthetic construct
  misc_feature 1..44: note = oligonucleotide decoy
  source 1..44: mol_type = other DNA
cagcgatgttacatcacgtgtaaataaacaggtggagccatttt

SEQ ID NO: 3699 - DNA, 44 bp, synthetic construct
  misc_feature 1..44: note = oligonucleotide decoy
  source 1..44: mol_type = other DNA
cagcgatgttacgtcacgtgtaaacaaacaggtggagccatttt

SEQ ID NO: 3700 - DNA, 44 bp, synthetic construct
  misc_feature 1..44: note = oligonucleotide decoy
  source 1..44: mol_type = other DNA
cagcgatgttacgtcacgtgtaaataaacaggtggagccatttt

SEQ ID NO: 3701 - DNA, 44 bp, synthetic construct
  misc_feature 1..44: note = oligonucleotide decoy
  source 1..44: mol_type = other DNA
cagcgatgttatatcacgtgtaaacaaacaggtggagccatttt

SEQ ID NO: 3702 - DNA, 44 bp, synthetic construct
  misc_feature 1..44: note = oligonucleotide decoy
  source 1..44: mol_type = other DNA
cagcgatgttatatcacgtgtaaataaacaggtggagccatttt

SEQ ID NO: 3703 - DNA, 44 bp, synthetic construct
  misc_feature 1..44: note = oligonucleotide decoy
  source 1..44: mol_type = other DNA
cagcgatgttatgtcacgtgtaaacaaacaggtggagccatttt

SEQ ID NO: 3704 - DNA, 44 bp, synthetic construct
  misc_feature 1..44: note = oligonucleotide decoy
  source 1..44: mol_type = other DNA
cagcgatgttatgtcacgtgtaaataaacaggtggagccatttt

SEQ ID NO: 3705 - DNA, 44 bp, synthetic construct
  misc_feature 1..44: note = oligonucleotide decoy
  source 1..44: mol_type = other DNA
cagcgctgttacatcacgtgtaaacaaacaggtggagccatttt

SEQ ID NO: 3706 - DNA, 44 bp, synthetic construct
  misc_feature 1..44: note = oligonucleotide decoy
  source 1..44: mol_type = other DNA
cagcgctgttacatcacgtgtaaataaacaggtggagccatttt

SEQ ID NO: 3707 - DNA, 44 bp, synthetic construct
  misc_feature 1..44: note = oligonucleotide decoy
  source 1..44: mol_type = other DNA
cagcgctgttacgtcacgtgtaaacaaacaggtggagccatttt

SEQ ID NO: 3708 - DNA, 44 bp, synthetic construct
  misc_feature 1..44: note = oligonucleotide decoy
  source 1..44: mol_type = other DNA
cagcgctgttacgtcacgtgtaaataaacaggtggagccatttt

SEQ ID NO: 3709 - DNA, 44 bp, synthetic construct
  misc_feature 1..44: note = oligonucleotide decoy
  source 1..44: mol_type = other DNA
cagcgctgttatatcacgtgtaaacaaacaggtggagccatttt

SEQ ID NO: 3710 - DNA, 44 bp, synthetic construct
  misc_feature 1..44: note = oligonucleotide decoy
  source 1..44: mol_type = other DNA
cagcgctgttatatcacgtgtaaataaacaggtggagccatttt

SEQ ID NO: 3711 - DNA, 44 bp, synthetic construct
  misc_feature 1..44: note = oligonucleotide decoy
  source 1..44: mol_type = other DNA
cagcgctgttatgtcacgtgtaaacaaacaggtggagccatttt

SEQ ID NO: 3712 - DNA, 44 bp, synthetic construct
  misc_feature 1..44: note = oligonucleotide decoy
  source 1..44: mol_type = other DNA
cagcgctgttatgtcacgtgtaaataaacaggtggagccatttt

SEQ ID NO: 3713 - DNA, 44 bp, synthetic construct
  misc_feature 1..44: note = oligonucleotide decoy
  source 1..44: mol_type = other DNA
cagcggtgttacatcacgtgtaaacaaacaggtggagccatttt

SEQ ID NO: 3714 - DNA, 44 bp, synthetic construct
  misc_feature 1..44: note = oligonucleotide decoy
  source 1..44: mol_type = other DNA
cagcggtgttacatcacgtgtaaataaacaggtggagccatttt

SEQ ID NO: 3715 - DNA, 44 bp, synthetic construct
  misc_feature 1..44: note = oligonucleotide decoy
  source 1..44: mol_type = other DNA
cagcggtgttacgtcacgtgtaaacaaacaggtggagccatttt

SEQ ID NO: 3716 - DNA, 44 bp, synthetic construct
  misc_feature 1..44: note = oligonucleotide decoy
  source 1..44: mol_type = other DNA
cagcggtgttacgtcacgtgtaaataaacaggtggagccatttt

SEQ ID NO: 3717 - DNA, 44 bp, synthetic construct
  misc_feature 1..44: note = oligonucleotide decoy
  source 1..44: mol_type = other DNA
cagcggtgttatatcacgtgtaaacaaacaggtggagccatttt

SEQ ID NO: 3718 - DNA, 44 bp, synthetic construct
  misc_feature 1..44: note = oligonucleotide decoy
  source 1..44: mol_type = other DNA
cagcggtgttatatcacgtgtaaataaacaggtggagccatttt

SEQ ID NO: 3719 - DNA, 44 bp, synthetic construct
  misc_feature 1..44: note = oligonucleotide decoy
  source 1..44: mol_type = other DNA
cagcggtgttatgtcacgtgtaaacaaacaggtggagccatttt

SEQ ID NO: 3720 - DNA, 44 bp, synthetic construct
  misc_feature 1..44: note = oligonucleotide decoy
  source 1..44: mol_type = other DNA
cagcggtgttatgtcacgtgtaaataaacaggtggagccatttt

SEQ ID NO: 3721 - DNA, 44 bp, synthetic construct
  misc_feature 1..44: note = oligonucleotide decoy
  source 1..44: mol_type = other DNA
cagcgttgttacatcacgtgtaaacaaacaggtggagccatttt

SEQ ID NO: 3722 - DNA, 44 bp, synthetic construct
  misc_feature 1..44: note = oligonucleotide decoy
  source 1..44: mol_type = other DNA
cagcgttgttacatcacgtgtaaataaacaggtggagccatttt

SEQ ID NO: 3723 - DNA, 44 bp, synthetic construct
  misc_feature 1..44: note = oligonucleotide decoy
  source 1..44: mol_type = other DNA
cagcgttgttacgtcacgtgtaaacaaacaggtggagccatttt

SEQ ID NO: 3724 - DNA, 44 bp, synthetic construct
  misc_feature 1..44: note = oligonucleotide decoy
  source 1..44: mol_type = other DNA
cagcgttgttacgtcacgtgtaaataaacaggtggagccatttt

SEQ ID NO: 3725 - DNA, 44 bp, synthetic construct
  misc_feature 1..44: note = oligonucleotide decoy
  source 1..44: mol_type = other DNA
cagcgttgttatatcacgtgtaaacaaacaggtggagccatttt

SEQ ID NO: 3726 - DNA, 44 bp, synthetic construct
  misc_feature 1..44: note = oligonucleotide decoy
  source 1..44: mol_type = other DNA
cagcgttgttatatcacgtgtaaataaacaggtggagccatttt

SEQ ID NO: 3727 - DNA, 44 bp, synthetic construct
  misc_feature 1..44: note = oligonucleotide decoy
  source 1..44: mol_type = other DNA
cagcgttgttatgtcacgtgtaaacaaacaggtggagccatttt

SEQ ID NO: 3728 - DNA, 44 bp, synthetic construct
  misc_feature 1..44: note = oligonucleotide decoy
  source 1..44: mol_type = other DNA
cagcgttgttatgtcacgtgtaaataaacaggtggagccatttt

SEQ ID NO: 3729 - DNA, 44 bp, synthetic construct
  misc_feature 1..44: note = oligonucleotide decoy
  source 1..44: mol_type = other DNA
catcgatgttacatcacgtgtaaacaaacaggtggagccatttt

SEQ ID NO: 3730 - DNA, 44 bp, synthetic construct
  misc_feature 1..44: note = oligonucleotide decoy
  source 1..44: mol_type = other DNA
catcgatgttacatcacgtgtaaataaacaggtggagccatttt

SEQ ID NO: 3731 - DNA, 44 bp, synthetic construct
  misc_feature 1..44: note = oligonucleotide decoy
  source 1..44: mol_type = other DNA
catcgatgttacgtcacgtgtaaacaaacaggtggagccatttt

SEQ ID NO: 3732 - DNA, 44 bp, synthetic construct
  misc_feature 1..44: note = oligonucleotide decoy
  source 1..44: mol_type = other DNA
catcgatgttacgtcacgtgtaaataaacaggtggagccatttt

SEQ ID NO: 3733 - DNA, 44 bp, synthetic construct
  misc_feature 1..44: note = oligonucleotide decoy
  source 1..44: mol_type = other DNA
catcgatgttatatcacgtgtaaacaaacaggtggagccatttt

SEQ ID NO: 3734 - DNA, 44 bp, synthetic construct
  misc_feature 1..44: note = oligonucleotide decoy
  source 1..44: mol_type = other DNA
catcgatgttatatcacgtgtaaataaacaggtggagccatttt

SEQ ID NO: 3735 - DNA, 44 bp, synthetic construct
  misc_feature 1..44: note = oligonucleotide decoy
  source 1..44: mol_type = other DNA
catcgatgttatgtcacgtgtaaacaaacaggtggagccatttt

SEQ ID NO: 3736 - DNA, 44 bp, synthetic construct
  misc_feature 1..44: note = oligonucleotide decoy
  source 1..44: mol_type = other DNA
catcgatgttatgtcacgtgtaaataaacaggtggagccatttt

SEQ ID NO: 3737 - DNA, 44 bp, synthetic construct
  misc_feature 1..44: note = oligonucleotide decoy
  source 1..44: mol_type = other DNA
catcgctgttacatcacgtgtaaacaaacaggtggagccatttt

SEQ ID NO: 3738 - DNA, 44 bp, synthetic construct
  misc_feature 1..44: note = oligonucleotide decoy
  source 1..44: mol_type = other DNA
catcgctgttacatcacgtgtaaataaacaggtggagccatttt

SEQ ID NO: 3739 - DNA, 44 bp, synthetic construct
  misc_feature 1..44: note = oligonucleotide decoy
  source 1..44: mol_type = other DNA
catcgctgttacgtcacgtgtaaacaaacaggtggagccatttt

SEQ ID NO: 3740 - DNA, 44 bp, synthetic construct
  misc_feature 1..44: note = oligonucleotide decoy
  source 1..44: mol_type = other DNA
catcgctgttacgtcacgtgtaaataaacaggtggagccatttt

SEQ ID NO: 3741 - DNA, 44 bp, synthetic construct
  misc_feature 1..44: note = oligonucleotide decoy
  source 1..44: mol_type = other DNA
catcgctgttatatcacgtgtaaacaaacaggtggagccatttt

SEQ ID NO: 3742 - DNA, 44 bp, synthetic construct
  misc_feature 1..44: note = oligonucleotide decoy
  source 1..44: mol_type = other DNA
catcgctgttatatcacgtgtaaataaacaggtggagccatttt

SEQ ID NO: 3743 - DNA, 44 bp, synthetic construct
  misc_feature 1..44: note = oligonucleotide decoy
  source 1..44: mol_type = other DNA
catcgctgttatgtcacgtgtaaacaaacaggtggagccatttt

SEQ ID NO: 3744 - DNA, 44 bp, synthetic construct
  misc_feature 1..44: note = oligonucleotide decoy
  source 1..44: mol_type = other DNA
catcgctgttatgtcacgtgtaaataaacaggtggagccatttt

SEQ ID NO: 3745 - DNA, 44 bp, synthetic construct
  misc_feature 1..44: note = oligonucleotide decoy
  source 1..44: mol_type = other DNA
catcggtgttacatcacgtgtaaacaaacaggtggagccatttt

SEQ ID NO: 3746 - DNA, 44 bp, synthetic construct
  misc_feature 1..44: note = oligonucleotide decoy
  source 1..44: mol_type = other DNA
catcggtgttacatcacgtgtaaataaacaggtggagccatttt

SEQ ID NO: 3747 - DNA, 44 bp, synthetic construct
  misc_feature 1..44: note = oligonucleotide decoy
  source 1..44: mol_type = other DNA
catcggtgttacgtcacgtgtaaacaaacaggtggagccatttt

SEQ ID NO: 3748 - DNA, 44 bp, synthetic construct
  misc_feature 1..44: note = oligonucleotide decoy
  source 1..44: mol_type = other DNA
catcggtgttacgtcacgtgtaaataaacaggtggagccatttt

SEQ ID NO: 3749 - DNA, 44 bp, synthetic construct
  misc_feature 1..44: note = oligonucleotide decoy
  source 1..44: mol_type = other DNA
catcggtgttatatcacgtgtaaacaaacaggtggagccatttt

SEQ ID NO: 3750 - DNA, 44 bp, synthetic construct
  misc_feature 1..44: note = oligonucleotide decoy
  source 1..44: mol_type = other DNA
catcggtgttatatcacgtgtaaataaacaggtggagccatttt

SEQ ID NO: 3751 - DNA, 44 bp, synthetic construct
  misc_feature 1..44: note = oligonucleotide decoy
  source 1..44: mol_type = other DNA
catcggtgttatgtcacgtgtaaacaaacaggtggagccatttt

SEQ ID NO: 3752 - DNA, 44 bp, synthetic construct
  misc_feature 1..44: note = oligonucleotide decoy
  source 1..44: mol_type = other DNA
catcggtgttatgtcacgtgtaaataaacaggtggagccatttt

SEQ ID NO: 3753 - DNA, 44 bp, synthetic construct
  misc_feature 1..44: note = oligonucleotide decoy
  source 1..44: mol_type = other DNA
catcgttgttacatcacgtgtaaacaaacaggtggagccatttt

SEQ ID NO: 3754 - DNA, 44 bp, synthetic construct
  misc_feature 1..44: note = oligonucleotide decoy
  source 1..44: mol_type = other DNA
catcgttgttacatcacgtgtaaataaacaggtggagccatttt

SEQ ID NO: 3755 - DNA, 44 bp, synthetic construct
  misc_feature 1..44: note = oligonucleotide decoy
  source 1..44: mol_type = other DNA
catcgttgttacgtcacgtgtaaacaaacaggtggagccatttt

SEQ ID NO: 3756 - DNA, 44 bp, synthetic construct
  misc_feature 1..44: note = oligonucleotide decoy
  source 1..44: mol_type = other DNA
catcgttgttacgtcacgtgtaaataaacaggtggagccatttt

SEQ ID NO: 3757 - DNA, 44 bp, synthetic construct
  misc_feature 1..44: note = oligonucleotide decoy
  source 1..44: mol_type = other DNA
catcgttgttatatcacgtgtaaacaaacaggtggagccatttt

SEQ ID NO: 3758 - DNA, 44 bp, synthetic construct
  misc_feature 1..44: note = oligonucleotide decoy
  source 1..44: mol_type = other DNA
catcgttgttatatcacgtgtaaataaacaggtggagccatttt

SEQ ID NO: 3759 - DNA, 44 bp, synthetic construct
  misc_feature 1..44: note = oligonucleotide decoy
  source 1..44: mol_type = other DNA
catcgttgttatgtcacgtgtaaacaaacaggtggagccatttt

SEQ ID NO: 3760 - DNA, 44 bp, synthetic construct
  misc_feature 1..44: note = oligonucleotide decoy
  source 1..44: mol_type = other DNA
catcgttgttatgtcacgtgtaaataaacaggtggagccatttt

SEQ ID NO: 3761 - DNA, 18 bp, synthetic construct
  misc_feature 1..18: note = oligonucleotide decoy
  source 1..18: mol_type = other DNA
aggtcattaatatcagca

SEQ ID NO: 3762 - DNA, 18 bp, synthetic construct
  misc_feature 1..18: note = oligonucleotide decoy
  source 1..18: mol_type = other DNA
cggtcattaatatcagca

SEQ ID NO: 3763 - DNA, 18 bp, synthetic construct
  misc_feature 1..18: note = oligonucleotide decoy
  source 1..18: mol_type = other DNA
gggtcattaatatcagca

SEQ ID NO: 3764 - DNA, 18 bp, synthetic construct
  misc_feature 1..18: note = oligonucleotide decoy
  source 1..18: mol_type = other DNA
aggtcattaatttcagca

SEQ ID NO: 3765 - DNA, 18 bp, synthetic construct
  misc_feature 1..18: note = oligonucleotide decoy
  source 1..18: mol_type = other DNA
cggtcattaatttcagca

SEQ ID NO: 3766 - DNA, 18 bp, synthetic construct
  misc_feature 1..18: note = oligonucleotide decoy
  source 1..18: mol_type = other DNA
gggtcattaatttcagca

SEQ ID NO: 3767 - DNA, 18 bp, synthetic construct
  misc_feature 1..18: note = oligonucleotide decoy
  source 1..18: mol_type = other DNA
aggtcattaatatcagcg

SEQ ID NO: 3768 - DNA, 18 bp, synthetic construct
  misc_feature 1..18: note = oligonucleotide decoy
  source 1..18: mol_type = other DNA
cggtcattaatatcagcg

SEQ ID NO: 3769 - DNA, 18 bp, synthetic construct
  misc_feature 1..18: note = oligonucleotide decoy
  source 1..18: mol_type = other DNA
gggtcattaatatcagcg

SEQ ID NO: 3770 - DNA, 18 bp, synthetic construct
  misc_feature 1..18: note = oligonucleotide decoy
  source 1..18: mol_type = other DNA
aggtcattaatttcagcg

SEQ ID NO: 3771 - DNA, 18 bp, synthetic construct
  misc_feature 1..18: note = oligonucleotide decoy
  source 1..18: mol_type = other DNA
cggtcattaatttcagcg

SEQ ID NO: 3772 - DNA, 18 bp, synthetic construct
  misc_feature 1..18: note = oligonucleotide decoy
  source 1..18: mol_type = other DNA
gggtcattaatttcagcg

SEQ ID NO: 3773 - DNA, 18 bp, synthetic construct
  misc_feature 1..18: note = oligonucleotide decoy
  source 1..18: mol_type = other DNA
aggccattaatatcagca

SEQ ID NO: 3774 - DNA, 18 bp, synthetic construct
  misc_feature 1..18: note = oligonucleotide decoy
  source 1..18: mol_type = other DNA
cggccattaatatcagca

SEQ ID NO: 3775 - DNA, 18 bp, synthetic construct
  misc_feature 1..18: note = oligonucleotide decoy
  source 1..18: mol_type = other DNA
gggccattaatatcagca

SEQ ID NO: 3776 - DNA, 18 bp, synthetic construct
  misc_feature 1..18: note = oligonucleotide decoy
  source 1..18: mol_type = other DNA
aggccattaatttcagca

SEQ ID NO: 3777 - DNA, 18 bp, synthetic construct
  misc_feature 1..18: note = oligonucleotide decoy
  source 1..18: mol_type = other DNA
cggccattaatttcagca

SEQ ID NO: 3778 - DNA, 18 bp, synthetic construct
  misc_feature 1..18: note = oligonucleotide decoy
  source 1..18: mol_type = other DNA
gggccattaatttcagca

SEQ ID NO: 3779 - DNA, 18 bp, synthetic construct
  misc_feature 1..18: note = oligonucleotide decoy
  source 1..18: mol_type = other DNA
aggccattaatatcagcg

SEQ ID NO: 3780 - DNA, 18 bp, synthetic construct
  misc_feature 1..18: note = oligonucleotide decoy
  source 1..18: mol_type = other DNA
cggccattaatatcagcg

SEQ ID NO: 3781 - DNA, 18 bp, synthetic construct
  misc_feature 1..18: note = oligonucleotide decoy
  source 1..18: mol_type = other DNA
gggccattaatatcagcg

SEQ ID NO: 3782 - DNA, 18 bp, synthetic construct
  misc_feature 1..18: note = oligonucleotide decoy
  source 1..18: mol_type = other DNA
aggccattaatttcagcg

SEQ ID NO: 3783 - DNA, 18 bp, synthetic construct
  misc_feature 1..18: note = oligonucleotide decoy
  source 1..18: mol_type = other DNA
cggccattaatttcagcg

SEQ ID NO: 3784 - DNA, 18 bp, synthetic construct
  misc_feature 1..18: note = oligonucleotide decoy
  source 1..18: mol_type = other DNA
gggccattaatttcagcg

SEQ ID NO: 3785 - DNA, 18 bp, synthetic construct
  misc_feature 1..18: note = oligonucleotide decoy
  source 1..18: mol_type = other DNA
aggtcagcaattaatatc

SEQ ID NO: 3786 - DNA, 18 bp, synthetic construct
  misc_feature 1..18: note = oligonucleotide decoy
  source 1..18: mol_type = other DNA
cggtcagcaattaatatc

SEQ ID NO: 3787 - DNA, 18 bp, synthetic construct
  misc_feature 1..18: note = oligonucleotide decoy
  source 1..18: mol_type = other DNA
gggtcagcaattaatatc

SEQ ID NO: 3788 - DNA, 18 bp, synthetic construct
  misc_feature 1..18: note = oligonucleotide decoy
  source 1..18: mol_type = other DNA
aggtcagcaattaatttc

SEQ ID NO: 3789 - DNA, 18 bp, synthetic construct
  misc_feature 1..18: note = oligonucleotide decoy
  source 1..18: mol_type = other DNA
cggtcagcaattaatttc

SEQ ID NO: 3790 - DNA, 18 bp, synthetic construct
  misc_feature 1..18: note = oligonucleotide decoy
  source 1..18: mol_type = other DNA
gggtcagcaattaatttc

SEQ ID NO: 3791 - DNA, 18 bp, synthetic construct
  misc_feature 1..18: note = oligonucleotide decoy
  source 1..18: mol_type = other DNA
gatattaatgggtcagca

SEQ ID NO: 3792 - DNA, 18 bp, synthetic construct
  misc_feature 1..18: note = oligonucleotide decoy
  source 1..18: mol_type = other DNA
gaaattaatgggtcagca

SEQ ID NO: 3793 - DNA, 18 bp, synthetic construct
  misc_feature 1..18: note = oligonucleotide decoy
  source 1..18: mol_type = other DNA
gatattaatgggtcagcg

SEQ ID NO: 3794 - DNA, 18 bp, synthetic construct
  misc_feature 1..18: note = oligonucleotide decoy
  source 1..18: mol_type = other DNA
gaaattaatgggtcagcg

SEQ ID NO: 3795 - DNA, 18 bp, synthetic construct
  misc_feature 1..18: note = oligonucleotide decoy
  source 1..18: mol_type = other DNA
gatattaatgaccgctga

SEQ ID NO: 3796 - DNA, 18 bp, synthetic construct
  misc_feature 1..18: note = oligonucleotide decoy
  source 1..18: mol_type = other DNA
gaaattaatgaccgctga

SEQ ID NO: 3797 - DNA, 18 bp, synthetic construct
  misc_feature 1..18: note = oligonucleotide decoy
  source 1..18: mol_type = other DNA
gatattaatggccgctga

SEQ ID NO: 3798 - DNA, 18 bp, synthetic construct
  misc_feature 1..18: note = oligonucleotide decoy
  source 1..18: mol_type = other DNA
gaaattaatggccgctga

SEQ ID NO: 3799 - DNA, 18 bp, synthetic construct
  misc_feature 1..18: note = oligonucleotide decoy
  source 1..18: mol_type = other DNA
gatattaattgctgacct

SEQ ID NO: 3800 - DNA, 18 bp, synthetic construct
  misc_feature 1..18: note = oligonucleotide decoy
  source 1..18: mol_type = other DNA
gatattaattgctgaccc

SEQ ID NO: 3801 - DNA, 18 bp, synthetic construct
  misc_feature 1..18: note = oligonucleotide decoy
  source 1..18: mol_type = other DNA
gatattaattgctgaccg

SEQ ID NO: 3802 - DNA, 18 bp, synthetic construct
  misc_feature 1..18: note = oligonucleotide decoy
  source 1..18: mol_type = other DNA
gaaattaattgctgacct

SEQ ID NO: 3803 - DNA, 18 bp, synthetic construct
  misc_feature 1..18: note = oligonucleotide decoy
  source 1..18: mol_type = other DNA
gaaattaattgctgaccc

SEQ ID NO: 3804 - DNA, 18 bp, synthetic construct
  misc_feature 1..18: note = oligonucleotide decoy
  source 1..18: mol_type = other DNA
gaaattaattgctgaccg

SEQ ID NO: 3805 - DNA, 18 bp, synthetic construct
  misc_feature 1..18: note = oligonucleotide decoy
  source 1..18: mol_type = other DNA
tgctgacccattaatatc

SEQ ID NO: 3806 - DNA, 18 bp, synthetic construct
  misc_feature 1..18: note = oligonucleotide decoy
  source 1..18: mol_type = other DNA
tgctgacccattaatttc

SEQ ID NO: 3807 - DNA, 18 bp, synthetic construct
  misc_feature 1..18: note = oligonucleotide decoy
  source 1..18: mol_type = other DNA
cgctgacccattaatatc

SEQ ID NO: 3808 - DNA, 18 bp, synthetic construct
  misc_feature 1..18: note = oligonucleotide decoy
  source 1..18: mol_type = other DNA
cgctgacccattaatttc

SEQ ID NO: 3809 - DNA, 18 bp, synthetic construct
  misc_feature 1..18: note = oligonucleotide decoy
  source 1..18: mol_type = other DNA
tcagcggtcattaatatc

SEQ ID NO: 3810 - DNA, 18 bp, synthetic construct
  misc_feature 1..18: note = oligonucleotide decoy
  source 1..18: mol_type = other DNA
tcagcggtcattaatttc

SEQ ID NO: 3811 - DNA, 18 bp, synthetic construct
  misc_feature 1..18: note = oligonucleotide decoy
  source 1..18: mol_type = other DNA
tcagcggccattaatatc

SEQ ID NO: 3812 - DNA, 18 bp, synthetic construct
  misc_feature 1..18: note = oligonucleotide decoy
  source 1..18: mol_type = other DNA
tcagcggccattaatttc

SEQ ID NO: 3813 - DNA, 18 bp, synthetic construct
  misc_feature 1..18: note = oligonucleotide decoy
  source 1..18: mol_type = other DNA
tgctgatattaatgacct

SEQ ID NO: 3814 - DNA, 18 bp, synthetic construct
  misc_feature 1..18: note = oligonucleotide decoy
  source 1..18: mol_type = other DNA
tgctgatattaatgaccc

SEQ ID NO: 3815 - DNA, 18 bp, synthetic construct
  misc_feature 1..18: note = oligonucleotide decoy
  source 1..18: mol_type = other DNA
tgctgatattaatgaccg

SEQ ID NO: 3816 - DNA, 18 bp, synthetic construct
  misc_feature 1..18: note = oligonucleotide decoy
  source 1..18: mol_type = other DNA
tgctgaaattaatgacct

SEQ ID NO: 3817 - DNA, 18 bp, synthetic construct
  misc_feature 1..18: note = oligonucleotide decoy
  source 1..18: mol_type = other DNA
tgctgaaattaatgaccc

SEQ ID NO: 3818 - DNA, 18 bp, synthetic construct
  misc_feature 1..18: note = oligonucleotide decoy
  source 1..18: mol_type = other DNA
tgctgaaattaatgaccg

SEQ ID NO: 3819 - DNA, 18 bp, synthetic construct
  misc_feature 1..18: note = oligonucleotide decoy
  source 1..18: mol_type = other DNA
cgctgatattaatgacct

SEQ ID NO: 3820 - DNA, 18 bp, synthetic construct
  misc_feature 1..18: note = oligonucleotide decoy
  source 1..18: mol_type = other DNA
cgctgatattaatgaccc

SEQ ID NO: 3821 - DNA, 18 bp, synthetic construct
  misc_feature 1..18: note = oligonucleotide decoy
  source 1..18: mol_type = other DNA
cgctgatattaatgaccg

SEQ ID NO: 3822 - DNA, 18 bp, synthetic construct
  misc_feature 1..18: note = oligonucleotide decoy
  source 1..18: mol_type = other DNA
tgctgatattaatggcct

SEQ ID NO: 3823 - DNA, 18 bp, synthetic construct
  misc_feature 1..18: note = oligonucleotide decoy
  source 1..18: mol_type = other DNA
tgctgatattaatggccc

SEQ ID NO: 3824 - DNA, 18 bp, synthetic construct
  misc_feature 1..18: note = oligonucleotide decoy
  source 1..18: mol_type = other DNA
tgctgatattaatggccg

SEQ ID NO: 3825 - DNA, 18 bp, synthetic construct
  misc_feature 1..18: note = oligonucleotide decoy
  source 1..18: mol_type = other DNA
cgctgaaattaatgacct

SEQ ID NO: 3826 - DNA, 18 bp, synthetic construct
  misc_feature 1..18: note = oligonucleotide decoy
  source 1..18: mol_type = other DNA
cgctgaaattaatgaccc

SEQ ID NO: 3827 - DNA, 18 bp, synthetic construct
  misc_feature 1..18: note = oligonucleotide decoy
  source 1..18: mol_type = other DNA
cgctgaaattaatgaccg

SEQ ID NO: 3828 - DNA, 18 bp, synthetic construct
  misc_feature 1..18: note = oligonucleotide decoy
  source 1..18: mol_type = other DNA
tgctgaaattaatggcct

SEQ ID NO: 3829 - DNA, 18 bp, synthetic construct
  misc_feature 1..18: note = oligonucleotide decoy
  source 1..18: mol_type = other DNA
tgctgaaattaatggccc

SEQ ID NO: 3830 - DNA, 18 bp, synthetic construct
  misc_feature 1..18: note = oligonucleotide decoy
  source 1..18: mol_type = other DNA
tgctgaaattaatggccg

SEQ ID NO: 3831 - DNA, 18 bp, synthetic construct
  misc_feature 1..18: note = oligonucleotide decoy
  source 1..18: mol_type = other DNA
cgctgatattaatggcct

SEQ ID NO: 3832 - DNA, 18 bp, synthetic construct
  misc_feature 1..18: note = oligonucleotide decoy
  source 1..18: mol_type = other DNA
cgctgatattaatggccc

SEQ ID NO: 3833 - DNA, 18 bp, synthetic construct
  misc_feature 1..18: note = oligonucleotide decoy
  source 1..18: mol_type = other DNA
cgctgatattaatggccg

SEQ ID NO: 3834 - DNA, 18 bp, synthetic construct
  misc_feature 1..18: note = oligonucleotide decoy
  source 1..18: mol_type = other DNA
cgctgaaattaatggcct

SEQ ID NO: 3835 - DNA, 18 bp, synthetic construct
  misc_feature 1..18: note = oligonucleotide decoy
  source 1..18: mol_type = other DNA
cgctgaaattaatggccc

SEQ ID NO: 3836 - DNA, 18 bp, synthetic construct
  misc_feature 1..18: note = oligonucleotide decoy
  source 1..18: mol_type = other DNA
cgctgaaattaatggccg

SEQ ID NO: 3837 - DNA, 29 bp, synthetic construct
  misc_feature 1..29: note = oligonucleotide decoy
  source 1..29: mol_type = other DNA
aggaagtgaaattaattgctgactcagca

SEQ ID NO: 3838 - DNA, 29 bp, synthetic construct
  misc_feature 1..29: note = oligonucleotide decoy
  source 1..29: mol_type = other DNA
aggaagtgaaattaattgctgagtcagca

SEQ ID NO: 3839 - DNA, 29 bp, synthetic construct
  misc_feature 1..29: note = oligonucleotide decoy
  source 1..29: mol_type = other DNA
gggaagtgaaattaattgctgactcagca

SEQ ID NO: 3840 - DNA, 29 bp, synthetic construct
  misc_feature 1..29: note = oligonucleotide decoy
  source 1..29: mol_type = other DNA
gggaagtgaaattaattgctgagtcagca

SEQ ID NO: 3841 - DNA, 29 bp, synthetic construct
  misc_feature 1..29: note = oligonucleotide decoy
  source 1..29: mol_type = other DNA
aggaaatgaaattaattgctgactcagca

SEQ ID NO: 3842 - DNA, 29 bp, synthetic construct
  misc_feature 1..29: note = oligonucleotide decoy
  source 1..29: mol_type = other DNA
aggaaatgaaattaattgctgagtcagca

SEQ ID NO: 3843 - DNA, 29 bp, synthetic construct
  misc_feature 1..29: note = oligonucleotide decoy
  source 1..29: mol_type = other DNA
aggaagtgaaattaattgctgactcagcg

SEQ ID NO: 3844 - DNA, 29 bp, synthetic construct
  misc_feature 1..29: note = oligonucleotide decoy
  source 1..29: mol_type = other DNA
aggaagtgaaattaattgctgagtcagcg

SEQ ID NO: 3845 - DNA, 29 bp, synthetic construct
  misc_feature 1..29: note = oligonucleotide decoy
  source 1..29: mol_type = other DNA
gggaaatgaaattaattgctgactcagca

SEQ ID NO: 3846 - DNA, 29 bp, synthetic construct
  misc_feature 1..29: note = oligonucleotide decoy
  source 1..29: mol_type = other DNA
gggaaatgaaattaattgctgagtcagca

SEQ ID NO: 3847 - DNA, 29 bp, synthetic construct
  misc_feature 1..29: note = oligonucleotide decoy
  source 1..29: mol_type = other DNA
gggaagtgaaattaattgctgactcagcg

SEQ ID NO: 3848 - DNA, 29 bp, synthetic construct
  misc_feature 1..29: note = oligonucleotide decoy
  source 1..29: mol_type = other DNA
gggaagtgaaattaattgctgagtcagcg

SEQ ID NO: 3849 - DNA, 29 bp, synthetic construct
  misc_feature 1..29: note = oligonucleotide decoy
  source 1..29: mol_type = other DNA
aggaaatgaaattaattgctgactcagcg

SEQ ID NO: 3850 - DNA, 29 bp, synthetic construct
  misc_feature 1..29: note = oligonucleotide decoy
  source 1..29: mol_type = other DNA
aggaaatgaaattaattgctgagtcagcg

SEQ ID NO: 3851 - DNA, 29 bp, synthetic construct
  misc_feature 1..29: note = oligonucleotide decoy
  source 1..29: mol_type = other DNA
gggaaatgaaattaattgctgactcagcg

SEQ ID NO: 3852 - DNA, 29 bp, synthetic construct
  misc_feature 1..29: note = oligonucleotide decoy
  source 1..29: mol_type = other DNA
gggaaatgaaattaattgctgagtcagcg

SEQ ID NO: 3853 - DNA, 29 bp, synthetic construct
  misc_feature 1..29: note = oligonucleotide decoy
  source 1..29: mol_type = other DNA
tgctgactcagcaattaatttcacttcct

SEQ ID NO: 3854 - DNA, 29 bp, synthetic construct
  misc_feature 1..29: note = oligonucleotide decoy
  source 1..29: mol_type = other DNA
tgctgagtcagcaattaatttcacttcct

SEQ ID NO: 3855 - DNA, 29 bp, synthetic construct
  misc_feature 1..29: note = oligonucleotide decoy
  source 1..29: mol_type = other DNA
tgctgactcagcaattaatttcacttccc

SEQ ID NO: 3856 - DNA, 29 bp, synthetic construct
  misc_feature 1..29: note = oligonucleotide decoy
  source 1..29: mol_type = other DNA
tgctgagtcagcaattaatttcacttccc

SEQ ID NO: 3857 - DNA, 29 bp, synthetic construct
  misc_feature 1..29: note = oligonucleotide decoy
  source 1..29: mol_type = other DNA
tgctgactcagcaattaatttcatttcct

SEQ ID NO: 3858 - DNA, 29 bp, synthetic construct
  misc_feature 1..29: note = oligonucleotide decoy
  source 1..29: mol_type = other DNA
tgctgagtcagcaattaatttcatttcct

SEQ ID NO: 3859 - DNA, 29 bp, synthetic construct
  misc_feature 1..29: note = oligonucleotide decoy
  source 1..29: mol_type = other DNA
cgctgactcagcaattaatttcacttcct

SEQ ID NO: 3860 - DNA, 29 bp, synthetic construct
  misc_feature 1..29: note = oligonucleotide decoy
  source 1..29: mol_type = other DNA
cgctgagtcagcaattaatttcacttcct

SEQ ID NO: 3861 - DNA, 29 bp, synthetic construct
  misc_feature 1..29: note = oligonucleotide decoy
  source 1..29: mol_type = other DNA
tgctgactcagcaattaatttcatttccc

SEQ ID NO: 3862 - DNA, 29 bp, synthetic construct
  misc_feature 1..29: note = oligonucleotide decoy
  source 1..29: mol_type = other DNA
tgctgagtcagcaattaatttcatttccc

SEQ ID NO: 3863 - DNA, 29 bp, synthetic construct
  misc_feature 1..29: note = oligonucleotide decoy
  source 1..29: mol_type = other DNA
cgctgactcagcaattaatttcacttccc

SEQ ID NO: 3864 - DNA, 29 bp, synthetic construct
  misc_feature 1..29: note = oligonucleotide decoy
  source 1..29: mol_type = other DNA
cgctgagtcagcaattaatttcacttccc

SEQ ID NO: 3865 - DNA, 29 bp, synthetic construct
  misc_feature 1..29: note = oligonucleotide decoy
  source 1..29: mol_type = other DNA
cgctgactcagcaattaatttcatttcct

SEQ ID NO: 3866 - DNA, 29 bp, synthetic construct
  misc_feature 1..29: note = oligonucleotide decoy
  source 1..29: mol_type = other DNA
cgctgagtcagcaattaatttcatttcct

SEQ ID NO: 3867 - DNA, 29 bp, synthetic construct
  misc_feature 1..29: note = oligonucleotide decoy
  source 1..29: mol_type = other DNA
cgctgactcagcaattaatttcatttccc

SEQ ID NO: 3868 - DNA, 29 bp, synthetic construct
  misc_feature 1..29: note = oligonucleotide decoy
  source 1..29: mol_type = other DNA
cgctgagtcagcaattaatttcatttccc

SEQ ID NO: 3869 - DNA, 57 bp, synthetic construct
  misc_feature 1..57: note = oligonucleotide decoy
  source 1..57: mol_type = other DNA
aacagaaggtaaacaaagattaaggcgccaattgacaggtgctgacccattaatatc

SEQ ID NO: 3870 - DNA, 57 bp, synthetic construct
  misc_feature 1..57: note = oligonucleotide decoy
  source 1..57: mol_type = other DNA
aacagaaggtaaacaaagattaaggcgccatttgacaggtgctgacccattaatatc

SEQ ID NO: 3871 - DNA, 57 bp, synthetic construct
  misc_feature 1..57: note = oligonucleotide decoy
  source 1..57: mol_type = other DNA
aacagaaggtaaacaaagattaaggcgcctattgacaggtgctgacccattaatatc

SEQ ID NO: 3872 - DNA, 57 bp, synthetic construct
  misc_feature 1..57: note = oligonucleotide decoy
  source 1..57: mol_type = other DNA
aacagaaggtaaacaaagattaaggcgccttttgacaggtgctgacccattaatatc

SEQ ID NO: 3873 - DNA, 57 bp, synthetic construct
  misc_feature 1..57: note = oligonucleotide decoy
  source 1..57: mol_type = other DNA
aacagaaggtaaacaaagattatggcgccaattgacaggtgctgacccattaatatc

SEQ ID NO: 3874 - DNA, 57 bp, synthetic construct
  misc_feature 1..57: note = oligonucleotide decoy
  source 1..57: mol_type = other DNA
aacagaaggtaaacaaagattatggcgccatttgacaggtgctgacccattaatatc

SEQ ID NO: 3875 - DNA, 57 bp, synthetic construct
  misc_feature 1..57: note = oligonucleotide decoy
  source 1..57: mol_type = other DNA
aacagaaggtaaacaaagattatggcgcctattgacaggtgctgacccattaatatc

SEQ ID NO: 3876 - DNA, 57 bp, synthetic construct
  misc_feature 1..57: note = oligonucleotide decoy
  source 1..57: mol_type = other DNA
aacagaaggtaaacaaagattatggcgccttttgacaggtgctgacccattaatatc

SEQ ID NO: 3877 - DNA, 57 bp, synthetic construct
  misc_feature 1..57: note = oligonucleotide decoy
  source 1..57: mol_type = other DNA
aacagaaggtaaacaaagattaaggcgccaattgacaggtgctgacccattaatttc

SEQ ID NO: 3878 - DNA, 57 bp, synthetic construct
  misc_feature 1..57: note = oligonucleotide decoy
  source 1..57: mol_type = other DNA
aacagaaggtaaacaaagattaaggcgccatttgacaggtgctgacccattaatttc

SEQ ID NO: 3879 - DNA, 57 bp, synthetic construct
  misc_feature 1..57: note = oligonucleotide decoy
  source 1..57: mol_type = other DNA
aacagaaggtaaacaaagattaaggcgcctattgacaggtgctgacccattaatttc

SEQ ID NO: 3880 - DNA, 57 bp, synthetic construct
  misc_feature 1..57: note = oligonucleotide decoy
  source 1..57: mol_type = other DNA
aacagaaggtaaacaaagattaaggcgccttttgacaggtgctgacccattaatttc

SEQ ID NO: 3881 - DNA, 57 bp, synthetic construct
  misc_feature 1..57: note = oligonucleotide decoy
  source 1..57: mol_type = other DNA
aacagaaggtaaacaaagattatggcgccaattgacaggtgctgacccattaatttc

SEQ ID NO: 3882 - DNA, 57 bp, synthetic construct
  misc_feature 1..57: note = oligonucleotide decoy
  source 1..57: mol_type = other DNA
aacagaaggtaaacaaagattatggcgccatttgacaggtgctgacccattaatttc

SEQ ID NO: 3883 - DNA, 57 bp, synthetic construct
  misc_feature 1..57: note = oligonucleotide decoy
  source 1..57: mol_type = other DNA
aacagaaggtaaacaaagattatggcgcctattgacaggtgctgacccattaatttc

SEQ ID NO: 3884 - DNA, 57 bp, synthetic construct
  misc_feature 1..57: note = oligonucleotide decoy
  source 1..57: mol_type = other DNA
aacagaaggtaaacaaagattatggcgccttttgacaggtgctgacccattaatttc

SEQ ID NO: 3885 - DNA, 57 bp, synthetic construct
  misc_feature 1..57: note = oligonucleotide decoy
  source 1..57: mol_type = other DNA
aacagaaggtaaacaaagattaaggcgccaaatgacaggtgctgacccattaatatc

SEQ ID NO: 3886 - DNA, 57 bp, synthetic construct
  misc_feature 1..57: note = oligonucleotide decoy
  source 1..57: mol_type = other DNA
aacagaaggtaaacaaagattaaggcgccatatgacaggtgctgacccattaatatc

SEQ ID NO: 3887 - DNA, 57 bp, synthetic construct
  misc_feature 1..57: note = oligonucleotide decoy
  source 1..57: mol_type = other DNA
aacagaaggtaaacaaagattaaggcgcctaatgacaggtgctgacccattaatatc

SEQ ID NO: 3888 - DNA, 57 bp, synthetic construct
  misc_feature 1..57: note = oligonucleotide decoy
  source 1..57: mol_type = other DNA
aacagaaggtaaacaaagattaaggcgccttatgacaggtgctgacccattaatatc

SEQ ID NO: 3889 - DNA, 57 bp, synthetic construct
  misc_feature 1..57: note = oligonucleotide decoy
  source 1..57: mol_type = other DNA
aacagaaggtaaacaaagattatggcgccaaatgacaggtgctgacccattaatatc

SEQ ID NO: 3890 - DNA, 57 bp, synthetic construct
  misc_feature 1..57: note = oligonucleotide decoy
  source 1..57: mol_type = other DNA
aacagaaggtaaacaaagattatggcgccatatgacaggtgctgacccattaatatc

SEQ ID NO: 3891 - DNA, 57 bp, synthetic construct
  misc_feature 1..57: note = oligonucleotide decoy
  source 1..57: mol_type = other DNA
aacagaaggtaaacaaagattatggcgcctaatgacaggtgctgacccattaatatc

SEQ ID NO: 3892 - DNA, 57 bp, synthetic construct
  misc_feature 1..57: note = oligonucleotide decoy
  source 1..57: mol_type = other DNA
aacagaaggtaaacaaagattatggcgccttatgacaggtgctgacccattaatatc

SEQ ID NO: 3893 - DNA, 57 bp, synthetic construct
  misc_feature 1..57: note = oligonucleotide decoy
  source 1..57: mol_type = other DNA
aacagaaggtaaacaaagattaaggcgccaaatgacaggtgctgacccattaatttc

SEQ ID NO: 3894 - DNA, 57 bp, synthetic construct
  misc_feature 1..57: note = oligonucleotide decoy
  source 1..57: mol_type = other DNA
aacagaaggtaaacaaagattaaggcgccatatgacaggtgctgacccattaatttc

SEQ ID NO: 3895 - DNA, 57 bp, synthetic construct
  misc_feature 1..57: note = oligonucleotide decoy
  source 1..57: mol_type = other DNA
aacagaaggtaaacaaagattaaggcgcctaatgacaggtgctgacccattaatttc

SEQ ID NO: 3896 - DNA, 57 bp, synthetic construct
  misc_feature 1..57: note = oligonucleotide decoy
  source 1..57: mol_type = other DNA
aacagaaggtaaacaaagattaaggcgccttatgacaggtgctgacccattaatttc

SEQ ID NO: 3897 - DNA, 57 bp, synthetic construct
  misc_feature 1..57: note = oligonucleotide decoy
  source 1..57: mol_type = other DNA
aacagaaggtaaacaaagattatggcgccaaatgacaggtgctgacccattaatttc

SEQ ID NO: 3898 - DNA, 57 bp, synthetic construct
  misc_feature 1..57: note = oligonucleotide decoy
  source 1..57: mol_type = other DNA
aacagaaggtaaacaaagattatggcgccatatgacaggtgctgacccattaatttc

SEQ ID NO: 3899 - DNA, 57 bp, synthetic construct
  misc_feature 1..57: note = oligonucleotide decoy
  source 1..57: mol_type = other DNA
aacagaaggtaaacaaagattatggcgcctaatgacaggtgctgacccattaatttc

SEQ ID NO: 3900 - DNA, 57 bp, synthetic construct
  misc_feature 1..57: note = oligonucleotide decoy
  source 1..57: mol_type = other DNA
aacagaaggtaaacaaagattatggcgccttatgacaggtgctgacccattaatttc

SEQ ID NO: 3901 - DNA, 57 bp, synthetic construct
  misc_feature 1..57: note = oligonucleotide decoy
  source 1..57: mol_type = other DNA
aaaaggcgccataatctttgtttaccttctgttgacaggtgctgacccattaatatc

SEQ ID NO: 3902 - DNA, 57 bp, synthetic construct
  misc_feature 1..57: note = oligonucleotide decoy
  source 1..57: mol_type = other DNA
aaaaggcgccttaatctttgtttaccttctgttgacaggtgctgacccattaatatc

SEQ ID NO: 3903 - DNA, 57 bp, synthetic construct
  misc_feature 1..57: note = oligonucleotide decoy
  source 1..57: mol_type = other DNA
aaatggcgccataatctttgtttaccttctgttgacaggtgctgacccattaatatc

SEQ ID NO: 3904 - DNA, 57 bp, synthetic construct
  misc_feature 1..57: note = oligonucleotide decoy
  source 1..57: mol_type = other DNA
aaatggcgccttaatctttgtttaccttctgttgacaggtgctgacccattaatatc

SEQ ID NO: 3905 - DNA, 57 bp, synthetic construct
  misc_feature 1..57: note = oligonucleotide decoy
  source 1..57: mol_type = other DNA
aataggcgccataatctttgtttaccttctgttgacaggtgctgacccattaatatc

SEQ ID NO: 3906 - DNA, 57 bp, synthetic construct
  misc_feature 1..57: note = oligonucleotide decoy
  source 1..57: mol_type = other DNA
aataggcgccttaatctttgtttaccttctgttgacaggtgctgacccattaatatc

SEQ ID NO: 3907 - DNA, 57 bp, synthetic construct
  misc_feature 1..57: note = oligonucleotide decoy
  source 1..57: mol_type = other DNA
aattggcgccataatctttgtttaccttctgttgacaggtgctgacccattaatatc

SEQ ID NO: 3908 - DNA, 57 bp, synthetic construct
  misc_feature 1..57: note = oligonucleotide decoy
  source 1..57: mol_type = other DNA
aattggcgccttaatctttgtttaccttctgttgacaggtgctgacccattaatatc

SEQ ID NO: 3909 - DNA, 57 bp, synthetic construct
  misc_feature 1..57: note = oligonucleotide decoy
  source 1..57: mol_type = other DNA
ataaggcgccataatctttgtttaccttctgttgacaggtgctgacccattaatatc

SEQ ID NO: 3910 - DNA, 57 bp, synthetic construct
  misc_feature 1..57: note = oligonucleotide decoy
  source 1..57: mol_type = other DNA
ataaggcgccttaatctttgtttaccttctgttgacaggtgctgacccattaatatc

SEQ ID NO: 3911 - DNA, 57 bp, synthetic construct
  misc_feature 1..57: note = oligonucleotide decoy
  source 1..57: mol_type = other DNA
atatggcgccataatctttgtttaccttctgttgacaggtgctgacccattaatatc

SEQ ID NO: 3912 - DNA, 57 bp, synthetic construct
  misc_feature 1..57: note = oligonucleotide decoy
  source 1..57: mol_type = other DNA
atatggcgccttaatctttgtttaccttctgttgacaggtgctgacccattaatatc

SEQ ID NO: 3913 - DNA, 57 bp, synthetic construct
  misc_feature 1..57: note = oligonucleotide decoy
  source 1..57: mol_type = other DNA
attaggcgccataatctttgtttaccttctgttgacaggtgctgacccattaatatc

SEQ ID NO: 3914 - DNA, 57 bp, synthetic construct
  misc_feature 1..57: note = oligonucleotide decoy
  source 1..57: mol_type = other DNA
attaggcgccttaatctttgtttaccttctgttgacaggtgctgacccattaatatc

SEQ ID NO: 3915 - DNA, 57 bp, synthetic construct
  misc_feature 1..57: note = oligonucleotide decoy
  source 1..57: mol_type = other DNA
atttggcgccataatctttgtttaccttctgttgacaggtgctgacccattaatatc

SEQ ID NO: 3916 - DNA, 57 bp, synthetic construct
  misc_feature 1..57: note = oligonucleotide decoy
  source 1..57: mol_type = other DNA
atttggcgccttaatctttgtttaccttctgttgacaggtgctgacccattaatatc

SEQ ID NO: 3917 - DNA, 57 bp, synthetic construct
  misc_feature 1..57: note = oligonucleotide decoy
  source 1..57: mol_type = other DNA
taaaggcgccataatctttgtttaccttctgttgacaggtgctgacccattaatatc

SEQ ID NO: 3918 - DNA, 57 bp, synthetic construct
  misc_feature 1..57: note = oligonucleotide decoy
  source 1..57: mol_type = other DNA
taaaggcgccttaatctttgtttaccttctgttgacaggtgctgacccattaatatc

SEQ ID NO: 3919 - DNA, 57 bp, synthetic construct
  misc_feature 1..57: note = oligonucleotide decoy
  source 1..57: mol_type = other DNA
taatggcgccataatctttgtttaccttctgttgacaggtgctgacccattaatatc

SEQ ID NO: 3920 - DNA, 57 bp, synthetic construct
  misc_feature 1..57: note = oligonucleotide decoy
  source 1..57: mol_type = other DNA
taatggcgccttaatctttgtttaccttctgttgacaggtgctgacccattaatatc

SEQ ID NO: 3921 - DNA, 57 bp, synthetic construct
  misc_feature 1..57: note = oligonucleotide decoy
  source 1..57: mol_type = other DNA
tataggcgccataatctttgtttaccttctgttgacaggtgctgacccattaatatc

SEQ ID NO: 3922 - DNA, 57 bp, synthetic construct
  misc_feature 1..57: note = oligonucleotide decoy
  source 1..57: mol_type = other DNA
tataggcgccttaatctttgtttaccttctgttgacaggtgctgacccattaatatc

SEQ ID NO: 3923 - DNA, 57 bp, synthetic construct
  misc_feature 1..57: note = oligonucleotide decoy
  source 1..57: mol_type = other DNA
tattggcgccataatctttgtttaccttctgttgacaggtgctgacccattaatatc

SEQ ID NO: 3924 - DNA, 57 bp, synthetic construct
  misc_feature 1..57: note = oligonucleotide decoy
  source 1..57: mol_type = other DNA
tattggcgccttaatctttgtttaccttctgttgacaggtgctgacccattaatatc

SEQ ID NO: 3925 - DNA, 57 bp, synthetic construct
  misc_feature 1..57: note = oligonucleotide decoy
  source 1..57: mol_type = other DNA
ttaaggcgccataatctttgtttaccttctgttgacaggtgctgacccattaatatc

SEQ ID NO: 3926 - DNA, 57 bp, synthetic construct
  misc_feature 1..57: note = oligonucleotide decoy
  source 1..57: mol_type = other DNA
ttaaggcgccttaatctttgtttaccttctgttgacaggtgctgacccattaatatc

SEQ ID NO: 3927 - DNA, 57 bp, synthetic construct
  misc_feature 1..57: note = oligonucleotide decoy
  source 1..57: mol_type = other DNA
ttatggcgccataatctttgtttaccttctgttgacaggtgctgacccattaatatc

SEQ ID NO: 3928 - DNA, 57 bp, synthetic construct
  misc_feature 1..57: note = oligonucleotide decoy
  source 1..57: mol_type = other DNA
ttatggcgccttaatctttgtttaccttctgttgacaggtgctgacccattaatatc

SEQ ID NO: 3929 - DNA, 57 bp, synthetic construct
  misc_feature 1..57: note = oligonucleotide decoy
  source 1..57: mol_type = other DNA
tttaggcgccataatctttgtttaccttctgttgacaggtgctgacccattaatatc

SEQ ID NO: 3930 - DNA, 57 bp, synthetic construct
  misc_feature 1..57: note = oligonucleotide decoy
  source 1..57: mol_type = other DNA
tttaggcgccttaatctttgtttaccttctgttgacaggtgctgacccattaatatc

SEQ ID NO: 3931 - DNA, 57 bp, synthetic construct
  misc_feature 1..57: note = oligonucleotide decoy
  source 1..57: mol_type = other DNA
ttttggcgccataatctttgtttaccttctgttgacaggtgctgacccattaatatc

SEQ ID NO: 3932 - DNA, 57 bp, synthetic construct
  misc_feature 1..57: note = oligonucleotide decoy
  source 1..57: mol_type = other DNA
ttttggcgccttaatctttgtttaccttctgttgacaggtgctgacccattaatatc

SEQ ID NO: 3933 - DNA, 57 bp, synthetic construct
  misc_feature 1..57: note = oligonucleotide decoy
  source 1..57: mol_type = other DNA
aaaaggcgccataatctttgtttaccttctgttgacaggtgctgacccattaatttc

SEQ ID NO: 3934 - DNA, 57 bp, synthetic construct
  misc_feature 1..57: note = oligonucleotide decoy
  source 1..57: mol_type = other DNA
aaaaggcgccttaatctttgtttaccttctgttgacaggtgctgacccattaatttc

SEQ ID NO: 3935 - DNA, 57 bp, synthetic construct
  misc_feature 1..57: note = oligonucleotide decoy
  source 1..57: mol_type = other DNA
aaatggcgccataatctttgtttaccttctgttgacaggtgctgacccattaatttc

SEQ ID NO: 3936 - DNA, 57 bp, synthetic construct
  misc_feature 1..57: note = oligonucleotide decoy
  source 1..57: mol_type = other DNA
aaatggcgccttaatctttgtttaccttctgttgacaggtgctgacccattaatttc

SEQ ID NO: 3937 - DNA, 57 bp, synthetic construct
  misc_feature 1..57: note = oligonucleotide decoy
  source 1..57: mol_type = other DNA
aataggcgccataatctttgtttaccttctgttgacaggtgctgacccattaatttc

SEQ ID NO: 3938 - DNA, 57 bp, synthetic construct
  misc_feature 1..57: note = oligonucleotide decoy
  source 1..57: mol_type = other DNA
aataggcgccttaatctttgtttaccttctgttgacaggtgctgacccattaatttc

SEQ ID NO: 3939 - DNA, 57 bp, synthetic construct
  misc_feature 1..57: note = oligonucleotide decoy
  source 1..57: mol_type = other DNA
aattggcgccataatctttgtttaccttctgttgacaggtgctgacccattaatttc

SEQ ID NO: 3940 - DNA, 57 bp, synthetic construct
  misc_feature 1..57: note = oligonucleotide decoy
  source 1..57: mol_type = other DNA
aattggcgccttaatctttgtttaccttctgttgacaggtgctgacccattaatttc

SEQ ID NO: 3941 - DNA, 57 bp, synthetic construct
  misc_feature 1..57: note = oligonucleotide decoy
  source 1..57: mol_type = other DNA
ataaggcgccataatctttgtttaccttctgttgacaggtgctgacccattaatttc

SEQ ID NO: 3942 - DNA, 57 bp, synthetic construct
  misc_feature 1..57: note = oligonucleotide decoy
  source 1..57: mol_type = other DNA
ataaggcgccttaatctttgtttaccttctgttgacaggtgctgacccattaatttc

SEQ ID NO: 3943 - DNA, 57 bp, synthetic construct
  misc_feature 1..57: note = oligonucleotide decoy
  source 1..57: mol_type = other DNA
atatggcgccataatctttgtttaccttctgttgacaggtgctgacccattaatttc

SEQ ID NO: 3944 - DNA, 57 bp, synthetic construct
  misc_feature 1..57: note = oligonucleotide decoy
  source 1..57: mol_type = other DNA
atatggcgccttaatctttgtttaccttctgttgacaggtgctgacccattaatttc

SEQ ID NO: 3945 - DNA, 57 bp, synthetic construct
  misc_feature 1..57: note = oligonucleotide decoy
  source 1..57: mol_type = other DNA
attaggcgccataatctttgtttaccttctgttgacaggtgctgacccattaatttc

SEQ ID NO: 3946 - DNA, 57 bp, synthetic construct
  misc_feature 1..57: note = oligonucleotide decoy
  source 1..57: mol_type = other DNA
attaggcgccttaatctttgtttaccttctgttgacaggtgctgacccattaatttc

SEQ ID NO: 3947 - DNA, 57 bp, synthetic construct
  misc_feature 1..57: note = oligonucleotide decoy
  source 1..57: mol_type = other DNA
atttggcgccataatctttgtttaccttctgttgacaggtgctgacccattaatttc

SEQ ID NO: 3948 - DNA, 57 bp, synthetic construct
  misc_feature 1..57: note = oligonucleotide decoy
  source 1..57: mol_type = other DNA
atttggcgccttaatctttgtttaccttctgttgacaggtgctgacccattaatttc

SEQ ID NO: 3949 - DNA, 57 bp, synthetic construct
  misc_feature 1..57: note = oligonucleotide decoy
  source 1..57: mol_type = other DNA
taaaggcgccataatctttgtttaccttctgttgacaggtgctgacccattaatttc

SEQ ID NO: 3950 - DNA, 57 bp, synthetic construct
  misc_feature 1..57: note = oligonucleotide decoy
  source 1..57: mol_type = other DNA
taaaggcgccttaatctttgtttaccttctgttgacaggtgctgacccattaatttc

SEQ ID NO: 3951 - DNA, 57 bp, synthetic construct
  misc_feature 1..57: note = oligonucleotide decoy
  source 1..57: mol_type = other DNA
taatggcgccataatctttgtttaccttctgttgacaggtgctgacccattaatttc

SEQ ID NO: 3952 - DNA, 57 bp, synthetic construct
  misc_feature 1..57: note = oligonucleotide decoy
  source 1..57: mol_type = other DNA
taatggcgccttaatctttgtttaccttctgttgacaggtgctgacccattaatttc

SEQ ID NO: 3953 - DNA, 57 bp, synthetic construct
  misc_feature 1..57: note = oligonucleotide decoy
  source 1..57: mol_type = other DNA
tataggcgccataatctttgtttaccttctgttgacaggtgctgacccattaatttc

SEQ ID NO: 3954 - DNA, 57 bp, synthetic construct
  misc_feature 1..57: note = oligonucleotide decoy
  source 1..57: mol_type = other DNA
tataggcgccttaatctttgtttaccttctgttgacaggtgctgacccattaatttc

SEQ ID NO: 3955 - DNA, 57 bp, synthetic construct
  misc_feature 1..57: note = oligonucleotide decoy
  source 1..57: mol_type = other DNA
tattggcgccataatctttgtttaccttctgttgacaggtgctgacccattaatttc

SEQ ID NO: 3956 - DNA, 57 bp, synthetic construct
  misc_feature 1..57: note = oligonucleotide decoy
  source 1..57: mol_type = other DNA
tattggcgccttaatctttgtttaccttctgttgacaggtgctgacccattaatttc

SEQ ID NO: 3957 - DNA, 57 bp, synthetic construct
  misc_feature 1..57: note = oligonucleotide decoy
  source 1..57: mol_type = other DNA
ttaaggcgccataatctttgtttaccttctgttgacaggtgctgacccattaatttc

SEQ ID NO: 3958 - DNA, 57 bp, synthetic construct
  misc_feature 1..57: note = oligonucleotide decoy
  source 1..57: mol_type = other DNA
ttaaggcgccttaatctttgtttaccttctgttgacaggtgctgacccattaatttc

SEQ ID NO: 3959 - DNA, 57 bp, synthetic construct
  misc_feature 1..57: note = oligonucleotide decoy
  source 1..57: mol_type = other DNA
ttatggcgccataatctttgtttaccttctgttgacaggtgctgacccattaatttc

SEQ ID NO: 3960 - DNA, 57 bp, synthetic construct
  misc_feature 1..57: note = oligonucleotide decoy
  source 1..57: mol_type = other DNA
ttatggcgccttaatctttgtttaccttctgttgacaggtgctgacccattaatttc

SEQ ID NO: 3961 - DNA, 57 bp, synthetic construct
  misc_feature 1..57: note = oligonucleotide decoy
  source 1..57: mol_type = other DNA
tttaggcgccataatctttgtttaccttctgttgacaggtgctgacccattaatttc

SEQ ID NO: 3962 - DNA, 57 bp, synthetic construct
  misc_feature 1..57: note = oligonucleotide decoy
  source 1..57: mol_type = other DNA
tttaggcgccttaatctttgtttaccttctgttgacaggtgctgacccattaatttc

SEQ ID NO: 3963 - DNA, 57 bp, synthetic construct
  misc_feature 1..57: note = oligonucleotide decoy
  source 1..57: mol_type = other DNA
ttttggcgccataatctttgtttaccttctgttgacaggtgctgacccattaatttc

SEQ ID NO: 3964 - DNA, 57 bp, synthetic construct
  misc_feature 1..57: note = oligonucleotide decoy
  source 1..57: mol_type = other DNA
ttttggcgccttaatctttgtttaccttctgttgacaggtgctgacccattaatttc

SEQ ID NO: 3965 - DNA, 57 bp, synthetic construct
  misc_feature 1..57: note = oligonucleotide decoy
  source 1..57: mol_type = other DNA
aacagaaggtaaacaaagattaaggcgccaattgacaggtgctgatattaatgacct

SEQ ID NO: 3966 - DNA, 57 bp, synthetic construct
  misc_feature 1..57: note = oligonucleotide decoy
  source 1..57: mol_type = other DNA
aacagaaggtaaacaaagattaaggcgccatttgacaggtgctgatattaatgacct

SEQ ID NO: 3967 - DNA, 57 bp, synthetic construct
  misc_feature 1..57: note = oligonucleotide decoy
  source 1..57: mol_type = other DNA
aacagaaggtaaacaaagattaaggcgcctattgacaggtgctgatattaatgacct

SEQ ID NO: 3968 - DNA, 57 bp, synthetic construct
  misc_feature 1..57: note = oligonucleotide decoy
  source 1..57: mol_type = other DNA
aacagaaggtaaacaaagattaaggcgccttttgacaggtgctgatattaatgacct

SEQ ID NO: 3969 - DNA, 57 bp, synthetic construct
  misc_feature 1..57: note = oligonucleotide decoy
  source 1..57: mol_type = other DNA
aacagaaggtaaacaaagattatggcgccaattgacaggtgctgatattaatgacct

SEQ ID NO: 3970 - DNA, 57 bp, synthetic construct
  misc_feature 1..57: note = oligonucleotide decoy
  source 1..57: mol_type = other DNA
aacagaaggtaaacaaagattatggcgccatttgacaggtgctgatattaatgacct

SEQ ID NO: 3971 - DNA, 57 bp, synthetic construct
  misc_feature 1..57: note = oligonucleotide decoy
  source 1..57: mol_type = other DNA
aacagaaggtaaacaaagattatggcgcctattgacaggtgctgatattaatgacct

SEQ ID NO: 3972 - DNA, 57 bp, synthetic construct
  misc_feature 1..57: note = oligonucleotide decoy
  source 1..57: mol_type = other DNA
aacagaaggtaaacaaagattatggcgccttttgacaggtgctgatattaatgacct

SEQ ID NO: 3973 - DNA, 57 bp, synthetic construct
  misc_feature 1..57: note = oligonucleotide decoy
  source 1..57: mol_type = other DNA
aacagaaggtaaacaaagattaaggcgccaattgacaggtgctgatattaatgaccc

SEQ ID NO: 3974 - DNA, 57 bp, synthetic construct
  misc_feature 1..57: note = oligonucleotide decoy
  source 1..57: mol_type = other DNA
aacagaaggtaaacaaagattaaggcgccaattgacaggtgctgatattaatgaccg

SEQ ID NO: 3975 - DNA, 57 bp, synthetic construct
  misc_feature 1..57: note = oligonucleotide decoy
  source 1..57: mol_type = other DNA
aacagaaggtaaacaaagattaaggcgccatttgacaggtgctgatattaatgaccc

SEQ ID NO: 3976 - DNA, 57 bp, synthetic construct
  misc_feature 1..57: note = oligonucleotide decoy
  source 1..57: mol_type = other DNA
aacagaaggtaaacaaagattaaggcgccatttgacaggtgctgatattaatgaccg

SEQ ID NO: 3977 - DNA, 57 bp, synthetic construct
  misc_feature 1..57: note = oligonucleotide decoy
  source 1..57: mol_type = other DNA
aacagaaggtaaacaaagattaaggcgcctattgacaggtgctgatattaatgaccc

SEQ ID NO: 3978 - DNA, 57 bp, synthetic construct
  misc_feature 1..57: note = oligonucleotide decoy
  source 1..57: mol_type = other DNA
aacagaaggtaaacaaagattaaggcgcctattgacaggtgctgatattaatgaccg

SEQ ID NO: 3979 - DNA, 57 bp, synthetic construct
  misc_feature 1..57: note = oligonucleotide decoy
  source 1..57: mol_type = other DNA
aacagaaggtaaacaaagattaaggcgccttttgacaggtgctgatattaatgaccc

SEQ ID NO: 3980 - DNA, 57 bp, synthetic construct
  misc_feature 1..57: note = oligonucleotide decoy
  source 1..57: mol_type = other DNA
aacagaaggtaaacaaagattaaggcgccttttgacaggtgctgatattaatgaccg

SEQ ID NO: 3981 - DNA, 57 bp, synthetic construct
  misc_feature 1..57: note = oligonucleotide decoy
  source 1..57: mol_type = other DNA
aacagaaggtaaacaaagattatggcgccaattgacaggtgctgatattaatgaccc

SEQ ID NO: 3982 - DNA, 57 bp, synthetic construct
  misc_feature 1..57: note = oligonucleotide decoy
  source 1..57: mol_type = other DNA
aacagaaggtaaacaaagattatggcgccaattgacaggtgctgatattaatgaccg

SEQ ID NO: 3983 - DNA, 57 bp, synthetic construct
  misc_feature 1..57: note = oligonucleotide decoy
  source 1..57: mol_type = other DNA
aacagaaggtaaacaaagattatggcgccatttgacaggtgctgatattaatgaccc

SEQ ID NO: 3984 - DNA, 57 bp, synthetic construct
  misc_feature 1..57: note = oligonucleotide decoy
  source 1..57: mol_type = other DNA
aacagaaggtaaacaaagattatggcgccatttgacaggtgctgatattaatgaccg

SEQ ID NO: 3985 - DNA, 57 bp, synthetic construct
  misc_feature 1..57: note = oligonucleotide decoy
  source 1..57: mol_type = other DNA
aacagaaggtaaacaaagattatggcgcctattgacaggtgctgatattaatgaccc

SEQ ID NO: 3986 - DNA, 57 bp, synthetic construct
  misc_feature 1..57: note = oligonucleotide decoy
  source 1..57: mol_type = other DNA
aacagaaggtaaacaaagattatggcgcctattgacaggtgctgatattaatgaccg

SEQ ID NO: 3987 - DNA, 57 bp, synthetic construct
  misc_feature 1..57: note = oligonucleotide decoy
  source 1..57: mol_type = other DNA
aacagaaggtaaacaaagattatggcgccttttgacaggtgctgatattaatgaccc

SEQ ID NO: 3988 - DNA, 57 bp, synthetic construct
  misc_feature 1..57: note = oligonucleotide decoy
  source 1..57: mol_type = other DNA
aacagaaggtaaacaaagattatggcgccttttgacaggtgctgatattaatgaccg

SEQ ID NO: 3989 - DNA, 57 bp, synthetic construct
  misc_feature 1..57: note = oligonucleotide decoy
  source 1..57: mol_type = other DNA
aacagaaggtaaacaaagattaaggcgccaattgacaggtgctgaaattaatgacct

SEQ ID NO: 3990 - DNA, 57 bp, synthetic construct
  misc_feature 1..57: note = oligonucleotide decoy
  source 1..57: mol_type = other DNA
aacagaaggtaaacaaagattaaggcgccatttgacaggtgctgaaattaatgacct

SEQ ID NO: 3991 - DNA, 57 bp, synthetic construct
  misc_feature 1..57: note = oligonucleotide decoy
  source 1..57: mol_type = other DNA
aacagaaggtaaacaaagattaaggcgcctattgacaggtgctgaaattaatgacct

SEQ ID NO: 3992 - DNA, 57 bp, synthetic construct
  misc_feature 1..57: note = oligonucleotide decoy
  source 1..57: mol_type = other DNA
aacagaaggtaaacaaagattaaggcgccttttgacaggtgctgaaattaatgacct

SEQ ID NO: 3993 - DNA, 57 bp, synthetic construct
  misc_feature 1..57: note = oligonucleotide decoy
  source 1..57: mol_type = other DNA
aacagaaggtaaacaaagattatggcgccaattgacaggtgctgaaattaatgacct

SEQ ID NO: 3994 - DNA, 57 bp, synthetic construct
  misc_feature 1..57: note = oligonucleotide decoy
  source 1..57: mol_type = other DNA
aacagaaggtaaacaaagattatggcgccatttgacaggtgctgaaattaatgacct

SEQ ID NO: 3995 - DNA, 57 bp, synthetic construct
  misc_feature 1..57: note = oligonucleotide decoy
  source 1..57: mol_type = other DNA
aacagaaggtaaacaaagattatggcgcctattgacaggtgctgaaattaatgacct

SEQ ID NO: 3996 - DNA, 57 bp, synthetic construct
  misc_feature 1..57: note = oligonucleotide decoy
  source 1..57: mol_type = other DNA
aacagaaggtaaacaaagattatggcgccttttgacaggtgctgaaattaatgacct

SEQ ID NO: 3997 - DNA, 57 bp, synthetic construct
  misc_feature 1..57: note = oligonucleotide decoy
  source 1..57: mol_type = other DNA
aacagaaggtaaacaaagattaaggcgccaattgacaggtgctgaaattaatgaccc

SEQ ID NO: 3998 - DNA, 57 bp, synthetic construct
  misc_feature 1..57: note = oligonucleotide decoy
  source 1..57: mol_type = other DNA
aacagaaggtaaacaaagattaaggcgccaattgacaggtgctgaaattaatgaccg

SEQ ID NO: 3999 - DNA, 57 bp, synthetic construct
  misc_feature 1..57: note = oligonucleotide decoy
  source 1..57: mol_type = other DNA
aacagaaggtaaacaaagattaaggcgccatttgacaggtgctgaaattaatgaccc

SEQ ID NO: 4000 - DNA, 57 bp, synthetic construct
  misc_feature 1..57: note = oligonucleotide decoy
  source 1..57: mol_type = other DNA
aacagaaggtaaacaaagattaaggcgccatttgacaggtgctgaaattaatgaccg

SEQ ID NO: 4001 - DNA, 57 bp, synthetic construct
  misc_feature 1..57: note = oligonucleotide decoy
  source 1..57: mol_type = other DNA
aacagaaggtaaacaaagattaaggcgcctattgacaggtgctgaaattaatgaccc

SEQ ID NO: 4002 - DNA, 57 bp, synthetic construct
  misc_feature 1..57: note = oligonucleotide decoy
  source 1..57: mol_type = other DNA
aacagaaggtaaacaaagattaaggcgcctattgacaggtgctgaaattaatgaccg

SEQ ID NO: 4003 - DNA, 57 bp, synthetic construct
  misc_feature 1..57: note = oligonucleotide decoy
  source 1..57: mol_type = other DNA
aacagaaggtaaacaaagattaaggcgccttttgacaggtgctgaaattaatgaccc

SEQ ID NO: 4004 - DNA, 57 bp, synthetic construct
  misc_feature 1..57: note = oligonucleotide decoy
  source 1..57: mol_type = other DNA
aacagaaggtaaacaaagattaaggcgccttttgacaggtgctgaaattaatgaccg

SEQ ID NO: 4005 - DNA, 57 bp, synthetic construct
  misc_feature 1..57: note = oligonucleotide decoy
  source 1..57: mol_type = other DNA
aacagaaggtaaacaaagattatggcgccaattgacaggtgctgaaattaatgaccc

SEQ ID NO: 4006 - DNA, 57 bp, synthetic construct
  misc_feature 1..57: note = oligonucleotide decoy
  source 1..57: mol_type = other DNA
aacagaaggtaaacaaagattatggcgccaattgacaggtgctgaaattaatgaccg

SEQ ID NO: 4007 - DNA, 57 bp, synthetic construct
  misc_feature 1..57: note = oligonucleotide decoy
  source 1..57: mol_type = other DNA
aacagaaggtaaacaaagattatggcgccatttgacaggtgctgaaattaatgaccc

SEQ ID NO: 4008 - DNA, 57 bp, synthetic construct
  misc_feature 1..57: note = oligonucleotide decoy
  source 1..57: mol_type = other DNA
aacagaaggtaaacaaagattatggcgccatttgacaggtgctgaaattaatgaccg

SEQ ID NO: 4009 - DNA, 57 bp, synthetic construct
  misc_feature 1..57: note = oligonucleotide decoy
  source 1..57: mol_type = other DNA
aacagaaggtaaacaaagattatggcgcctattgacaggtgctgaaattaatgaccc

SEQ ID NO: 4010 - DNA, 57 bp, synthetic construct
  misc_feature 1..57: note = oligonucleotide decoy
  source 1..57: mol_type = other DNA
aacagaaggtaaacaaagattatggcgcctattgacaggtgctgaaattaatgaccg

SEQ ID NO: 4011 - DNA, 57 bp, synthetic construct
  misc_feature 1..57: note = oligonucleotide decoy
  source 1..57: mol_type = other DNA
aacagaaggtaaacaaagattatggcgccttttgacaggtgctgaaattaatgaccc

SEQ ID NO: 4012 - DNA, 57 bp, synthetic construct
  misc_feature 1..57: note = oligonucleotide decoy
  source 1..57: mol_type = other DNA
aacagaaggtaaacaaagattatggcgccttttgacaggtgctgaaattaatgaccg

SEQ ID NO: 4013 - DNA, 57 bp, synthetic construct
  misc_feature 1..57: note = oligonucleotide decoy
  source 1..57: mol_type = other DNA
aacagaaggtaaacaaagattaaggcgccaattgacaggtgctgatattaatggcct

SEQ ID NO: 4014 - DNA, 57 bp, synthetic construct
  misc_feature 1..57: note = oligonucleotide decoy
  source 1..57: mol_type = other DNA
aacagaaggtaaacaaagattaaggcgccatttgacaggtgctgatattaatggcct

SEQ ID NO: 4015 - DNA, 57 bp, synthetic construct
  misc_feature 1..57: note = oligonucleotide decoy
  source 1..57: mol_type = other DNA
aacagaaggtaaacaaagattaaggcgcctattgacaggtgctgatattaatggcct

SEQ ID NO: 4016 - DNA, 57 bp, synthetic construct
  misc_feature 1..57: note = oligonucleotide decoy
  source 1..57: mol_type = other DNA
aacagaaggtaaacaaagattaaggcgccttttgacaggtgctgatattaatggcct

SEQ ID NO: 4017 - DNA, 57 bp, synthetic construct
  misc_feature 1..57: note = oligonucleotide decoy
  source 1..57: mol_type = other DNA
aacagaaggtaaacaaagattatggcgccaattgacaggtgctgatattaatggcct

SEQ ID NO: 4018 - DNA, 57 bp, synthetic construct
  misc_feature 1..57: note = oligonucleotide decoy
  source 1..57: mol_type = other DNA
aacagaaggtaaacaaagattatggcgccatttgacaggtgctgatattaatggcct

SEQ ID NO: 4019 - DNA, 57 bp, synthetic construct
  misc_feature 1..57: note = oligonucleotide decoy
  source 1..57: mol_type = other DNA
aacagaaggtaaacaaagattatggcgcctattgacaggtgctgatattaatggcct

SEQ ID NO: 4020 - DNA, 57 bp, synthetic construct
  misc_feature 1..57: note = oligonucleotide decoy
  source 1..57: mol_type = other DNA
aacagaaggtaaacaaagattatggcgccttttgacaggtgctgatattaatggcct

SEQ ID NO: 4021 - DNA, 57 bp, synthetic construct
  misc_feature 1..57: note = oligonucleotide decoy
  source 1..57: mol_type = other DNA
aacagaaggtaaacaaagattaaggcgccaattgacaggtgctgatattaatggccc

SEQ ID NO: 4022 - DNA, 57 bp, synthetic construct
  misc_feature 1..57: note = oligonucleotide decoy
  source 1..57: mol_type = other DNA
aacagaaggtaaacaaagattaaggcgccaattgacaggtgctgatattaatggccg

SEQ ID NO: 4023 - DNA, 57 bp, synthetic construct
  misc_feature 1..57: note = oligonucleotide decoy
  source 1..57: mol_type = other DNA
aacagaaggtaaacaaagattaaggcgccatttgacaggtgctgatattaatggccc

SEQ ID NO: 4024 - DNA, 57 bp, synthetic construct
  misc_feature 1..57: note = oligonucleotide decoy
  source 1..57: mol_type = other DNA
aacagaaggtaaacaaagattaaggcgccatttgacaggtgctgatattaatggccg

SEQ ID NO: 4025 - DNA, 57 bp, synthetic construct
  misc_feature 1..57: note = oligonucleotide decoy
  source 1..57: mol_type = other DNA
aacagaaggtaaacaaagattaaggcgcctattgacaggtgctgatattaatggccc

SEQ ID NO: 4026 - DNA, 57 bp, synthetic construct
  misc_feature 1..57: note = oligonucleotide decoy
  source 1..57: mol_type = other DNA
aacagaaggtaaacaaagattaaggcgcctattgacaggtgctgatattaatggccg

SEQ ID NO: 4027 - DNA, 57 bp, synthetic construct
  misc_feature 1..57: note = oligonucleotide decoy
  source 1..57: mol_type = other DNA
aacagaaggtaaacaaagattaaggcgccttttgacaggtgctgatattaatggccc

SEQ ID NO: 4028 - DNA, 57 bp, synthetic construct
  misc_feature 1..57: note = oligonucleotide decoy
  source 1..57: mol_type = other DNA
aacagaaggtaaacaaagattaaggcgccttttgacaggtgctgatattaatggccg

SEQ ID NO: 4029 - DNA, 57 bp, synthetic construct
  misc_feature 1..57: note = oligonucleotide decoy
  source 1..57: mol_type = other DNA
aacagaaggtaaacaaagattatggcgccaattgacaggtgctgatattaatggccc

SEQ ID NO: 4030 - DNA, 57 bp, synthetic construct
  misc_feature 1..57: note = oligonucleotide decoy
  source 1..57: mol_type = other DNA
aacagaaggtaaacaaagattatggcgccaattgacaggtgctgatattaatggccg

SEQ ID NO: 4031 - DNA, 57 bp, synthetic construct
  misc_feature 1..57: note = oligonucleotide decoy
  source 1..57: mol_type = other DNA
aacagaaggtaaacaaagattatggcgccatttgacaggtgctgatattaatggccc

SEQ ID NO: 4032 - DNA, 57 bp, synthetic construct
  misc_feature 1..57: note = oligonucleotide decoy
  source 1..57: mol_type = other DNA
aacagaaggtaaacaaagattatggcgccatttgacaggtgctgatattaatggccg

SEQ ID NO: 4033 - DNA, 57 bp, synthetic construct
  misc_feature 1..57: note = oligonucleotide decoy
  source 1..57: mol_type = other DNA
aacagaaggtaaacaaagattatggcgcctattgacaggtgctgatattaatggccc

SEQ ID NO: 4034 - DNA, 57 bp, synthetic construct
  misc_feature 1..57: note = oligonucleotide decoy
  source 1..57: mol_type = other DNA
aacagaaggtaaacaaagattatggcgcctattgacaggtgctgatattaatggccg

SEQ ID NO: 4035 - DNA, 57 bp, synthetic construct
  misc_feature 1..57: note = oligonucleotide decoy
  source 1..57: mol_type = other DNA
aacagaaggtaaacaaagattatggcgccttttgacaggtgctgatattaatggccc

SEQ ID NO: 4036 - DNA, 57 bp, synthetic construct
  misc_feature 1..57: note = oligonucleotide decoy
  source 1..57: mol_type = other DNA
aacagaaggtaaacaaagattatggcgccttttgacaggtgctgatattaatggccg

SEQ ID NO: 4037 - DNA, 57 bp, synthetic construct
  misc_feature 1..57: note = oligonucleotide decoy
  source 1..57: mol_type = other DNA
aacagaaggtaaacaaagattaaggcgccaaatgacaggtgctgatattaatgacct

SEQ ID NO: 4038 - DNA, 57 bp, synthetic construct
  misc_feature 1..57: note = oligonucleotide decoy
  source 1..57: mol_type = other DNA
aacagaaggtaaacaaagattaaggcgccatatgacaggtgctgatattaatgacct

SEQ ID NO: 4039 - DNA, 57 bp, synthetic construct
  misc_feature 1..57: note = oligonucleotide decoy
  source 1..57: mol_type = other DNA
aacagaaggtaaacaaagattaaggcgcctaatgacaggtgctgatattaatgacct

SEQ ID NO: 4040 - DNA, 57 bp, synthetic construct
  misc_feature 1..57: note = oligonucleotide decoy
  source 1..57: mol_type = other DNA
aacagaaggtaaacaaagattaaggcgccttatgacaggtgctgatattaatgacct

SEQ ID NO: 4041 - DNA, 57 bp, synthetic construct
  misc_feature 1..57: note = oligonucleotide decoy
  source 1..57: mol_type = other DNA
aacagaaggtaaacaaagattatggcgccaaatgacaggtgctgatattaatgacct

SEQ ID NO: 4042 - DNA, 57 bp, synthetic construct
  misc_feature 1..57: note = oligonucleotide decoy
  source 1..57: mol_type = other DNA
aacagaaggtaaacaaagattatggcgccatatgacaggtgctgatattaatgacct

SEQ ID NO: 4043 - DNA, 57 bp, synthetic construct
  misc_feature 1..57: note = oligonucleotide decoy
  source 1..57: mol_type = other DNA
aacagaaggtaaacaaagattatggcgcctaatgacaggtgctgatattaatgacct

SEQ ID NO: 4044 - DNA, 57 bp, synthetic construct
  misc_feature 1..57: note = oligonucleotide decoy
  source 1..57: mol_type = other DNA
aacagaaggtaaacaaagattatggcgccttatgacaggtgctgatattaatgacct

SEQ ID NO: 4045 - DNA, 57 bp, synthetic construct
  misc_feature 1..57: note = oligonucleotide decoy
  source 1..57: mol_type = other DNA
aacagaaggtaaacaaagattaaggcgccaaatgacaggtgctgatattaatgaccc

SEQ ID NO: 4046 - DNA, 57 bp, synthetic construct
  misc_feature 1..57: note = oligonucleotide decoy
  source 1..57: mol_type = other DNA
aacagaaggtaaacaaagattaaggcgccaaatgacaggtgctgatattaatgaccg

SEQ ID NO: 4047 - DNA, 57 bp, synthetic construct
  misc_feature 1..57: note = oligonucleotide decoy
  source 1..57: mol_type = other DNA
aacagaaggtaaacaaagattaaggcgccatatgacaggtgctgatattaatgaccc

SEQ ID NO: 4048 - DNA, 57 bp, synthetic construct
  misc_feature 1..57: note = oligonucleotide decoy
  source 1..57: mol_type = other DNA
aacagaaggtaaacaaagattaaggcgccatatgacaggtgctgatattaatgaccg

SEQ ID NO: 4049 - DNA, 57 bp, synthetic construct
  misc_feature 1..57: note = oligonucleotide decoy
  source 1..57: mol_type = other DNA
aacagaaggtaaacaaagattaaggcgcctaatgacaggtgctgatattaatgaccc

SEQ ID NO: 4050 - DNA, 57 bp, synthetic construct
  misc_feature 1..57: note = oligonucleotide decoy
  source 1..57: mol_type = other DNA
aacagaaggtaaacaaagattaaggcgcctaatgacaggtgctgatattaatgaccg

SEQ ID NO: 4051 - DNA, 57 bp, synthetic construct
  misc_feature 1..57: note = oligonucleotide decoy
  source 1..57: mol_type = other DNA
aacagaaggtaaacaaagattaaggcgccttatgacaggtgctgatattaatgaccc

SEQ ID NO: 4052 - DNA, 57 bp, synthetic construct
  misc_feature 1..57: note = oligonucleotide decoy
  source 1..57: mol_type = other DNA
aacagaaggtaaacaaagattaaggcgccttatgacaggtgctgatattaatgaccg

SEQ ID NO: 4053 - DNA, 57 bp, synthetic construct
  misc_feature 1..57: note = oligonucleotide decoy
  source 1..57: mol_type = other DNA
aacagaaggtaaacaaagattatggcgccaaatgacaggtgctgatattaatgaccc

SEQ ID NO: 4054 - DNA, 57 bp, synthetic construct
  misc_feature 1..57: note = oligonucleotide decoy
  source 1..57: mol_type = other DNA
aacagaaggtaaacaaagattatggcgccaaatgacaggtgctgatattaatgaccg

SEQ ID NO: 4055 - DNA, 57 bp, synthetic construct
  misc_feature 1..57: note = oligonucleotide decoy
  source 1..57: mol_type = other DNA
aacagaaggtaaacaaagattatggcgccatatgacaggtgctgatattaatgaccc

SEQ ID NO: 4056 - DNA, 57 bp, synthetic construct
  misc_feature 1..57: note = oligonucleotide decoy
  source 1..57: mol_type = other DNA
aacagaaggtaaacaaagattatggcgccatatgacaggtgctgatattaatgaccg

SEQ ID NO: 4057 - DNA, 57 bp, synthetic construct
  misc_feature 1..57: note = oligonucleotide decoy
  source 1..57: mol_type = other DNA
aacagaaggtaaacaaagattatggcgcctaatgacaggtgctgatattaatgaccc

SEQ ID NO: 4058 - DNA, 57 bp, synthetic construct
  misc_feature 1..57: note = oligonucleotide decoy
  source 1..57: mol_type = other DNA
aacagaaggtaaacaaagattatggcgcctaatgacaggtgctgatattaatgaccg

SEQ ID NO: 4059 - DNA, 57 bp, synthetic construct
  misc_feature 1..57: note = oligonucleotide decoy
  source 1..57: mol_type = other DNA
aacagaaggtaaacaaagattatggcgccttatgacaggtgctgatattaatgaccc

SEQ ID NO: 4060 - DNA, 57 bp, synthetic construct
  misc_feature 1..57: note = oligonucleotide decoy
  source 1..57: mol_type = other DNA
aacagaaggtaaacaaagattatggcgccttatgacaggtgctgatattaatgaccg

SEQ ID NO: 4061 - DNA, 57 bp, synthetic construct
  misc_feature 1..57: note = oligonucleotide decoy
  source 1..57: mol_type = other DNA
aacagaaggtaaacaaagattaaggcgccaattgacaggtgctgaaattaatggcct

SEQ ID NO: 4062 - DNA, 57 bp, synthetic construct
  misc_feature 1..57: note = oligonucleotide decoy
  source 1..57: mol_type = other DNA
aacagaaggtaaacaaagattaaggcgccatttgacaggtgctgaaattaatggcct

SEQ ID NO: 4063 - DNA, 57 bp, synthetic construct
  misc_feature 1..57: note = oligonucleotide decoy
  source 1..57: mol_type = other DNA
aacagaaggtaaacaaagattaaggcgcctattgacaggtgctgaaattaatggcct

SEQ ID NO: 4064 - DNA, 57 bp, synthetic construct
  misc_feature 1..57: note = oligonucleotide decoy
  source 1..57: mol_type = other DNA
aacagaaggtaaacaaagattaaggcgccttttgacaggtgctgaaattaatggcct

SEQ ID NO: 4065 - DNA, 57 bp, synthetic construct
  misc_feature 1..57: note = oligonucleotide decoy
  source 1..57: mol_type = other DNA
aacagaaggtaaacaaagattatggcgccaattgacaggtgctgaaattaatggcct

SEQ ID NO: 4066 - DNA, 57 bp, synthetic construct
  misc_feature 1..57: note = oligonucleotide decoy
  source 1..57: mol_type = other DNA
aacagaaggtaaacaaagattatggcgccatttgacaggtgctgaaattaatggcct

SEQ ID NO: 4067 - DNA, 57 bp, synthetic construct
  misc_feature 1..57: note = oligonucleotide decoy
  source 1..57: mol_type = other DNA
aacagaaggtaaacaaagattatggcgcctattgacaggtgctgaaattaatggcct

SEQ ID NO: 4068 - DNA, 57 bp, synthetic construct
  misc_feature 1..57: note = oligonucleotide decoy
  source 1..57: mol_type = other DNA
aacagaaggtaaacaaagattatggcgccttttgacaggtgctgaaattaatggcct

SEQ ID NO: 4069 - DNA, 57 bp, synthetic construct
  misc_feature 1..57: note = oligonucleotide decoy
  source 1..57: mol_type = other DNA
aacagaaggtaaacaaagattaaggcgccaattgacaggtgctgaaattaatggccc

SEQ ID NO: 4070 - DNA, 57 bp, synthetic construct
  misc_feature 1..57: note = oligonucleotide decoy
  source 1..57: mol_type = other DNA
aacagaaggtaaacaaagattaaggcgccaattgacaggtgctgaaattaatggccg

SEQ ID NO: 4071 - DNA, 57 bp, synthetic construct
  misc_feature 1..57: note = oligonucleotide decoy
  source 1..57: mol_type = other DNA
aacagaaggtaaacaaagattaaggcgccatttgacaggtgctgaaattaatggccc

SEQ ID NO: 4072 - DNA, 57 bp, synthetic construct
  misc_feature 1..57: note = oligonucleotide decoy
  source 1..57: mol_type = other DNA
aacagaaggtaaacaaagattaaggcgccatttgacaggtgctgaaattaatggccg

SEQ ID NO: 4073 - DNA, 57 bp, synthetic construct
  misc_feature 1..57: note = oligonucleotide decoy
  source 1..57: mol_type = other DNA
aacagaaggtaaacaaagattaaggcgcctattgacaggtgctgaaattaatggccc

SEQ ID NO: 4074 - DNA, 57 bp, synthetic construct
  misc_feature 1..57: note = oligonucleotide decoy
  source 1..57: mol_type = other DNA
aacagaaggtaaacaaagattaaggcgcctattgacaggtgctgaaattaatggccg

SEQ ID NO: 4075 - DNA, 57 bp, synthetic construct
  misc_feature 1..57: note = oligonucleotide decoy
  source 1..57: mol_type = other DNA
aacagaaggtaaacaaagattaaggcgccttttgacaggtgctgaaattaatggccc

SEQ ID NO: 4076 - DNA, 57 bp, synthetic construct
  misc_feature 1..57: note = oligonucleotide decoy
  source 1..57: mol_type = other DNA
aacagaaggtaaacaaagattaaggcgccttttgacaggtgctgaaattaatggccg

SEQ ID NO: 4077 - DNA, 57 bp, synthetic construct
  misc_feature 1..57: note = oligonucleotide decoy
  source 1..57: mol_type = other DNA
aacagaaggtaaacaaagattatggcgccaattgacaggtgctgaaattaatggccc

SEQ ID NO: 4078 - DNA, 57 bp, synthetic construct
  misc_feature 1..57: note = oligonucleotide decoy
  source 1..57: mol_type = other DNA
aacagaaggtaaacaaagattatggcgccaattgacaggtgctgaaattaatggccg

SEQ ID NO: 4079 - DNA, 57 bp, synthetic construct
  misc_feature 1..57: note = oligonucleotide decoy
  source 1..57: mol_type = other DNA
aacagaaggtaaacaaagattatggcgccatttgacaggtgctgaaattaatggccc

SEQ ID NO: 4080 - DNA, 57 bp, synthetic construct
  misc_feature 1..57: note = oligonucleotide decoy
  source 1..57: mol_type = other DNA
aacagaaggtaaacaaagattatggcgccatttgacaggtgctgaaattaatggccg

SEQ ID NO: 4081 - DNA, 57 bp, synthetic construct
  misc_feature 1..57: note = oligonucleotide decoy
  source 1..57: mol_type = other DNA
aacagaaggtaaacaaagattatggcgcctattgacaggtgctgaaattaatggccc

SEQ ID NO: 4082 - DNA, 57 bp, synthetic construct
  misc_feature 1..57: note = oligonucleotide decoy
  source 1..57: mol_type = other DNA
aacagaaggtaaacaaagattatggcgcctattgacaggtgctgaaattaatggccg

SEQ ID NO: 4083 - DNA, 57 bp, synthetic construct
  misc_feature 1..57: note = oligonucleotide decoy
  source 1..57: mol_type = other DNA
aacagaaggtaaacaaagattatggcgccttttgacaggtgctgaaattaatggccc

SEQ ID NO: 4084 - DNA, 57 bp, synthetic construct
  misc_feature 1..57: note = oligonucleotide decoy
  source 1..57: mol_type = other DNA
aacagaaggtaaacaaagattatggcgccttttgacaggtgctgaaattaatggccg

SEQ ID NO: 4085 - DNA, 57 bp, synthetic construct
  misc_feature 1..57: note = oligonucleotide decoy
  source 1..57: mol_type = other DNA
aacagaaggtaaacaaagattaaggcgccaaatgacaggtgctgaaattaatgacct

SEQ ID NO: 4086 - DNA, 57 bp, synthetic construct
  misc_feature 1..57: note = oligonucleotide decoy
  source 1..57: mol_type = other DNA
aacagaaggtaaacaaagattaaggcgccatatgacaggtgctgaaattaatgacct

SEQ ID NO: 4087 - DNA, 57 bp, synthetic construct
  misc_feature 1..57: note = oligonucleotide decoy
  source 1..57: mol_type = other DNA
aacagaaggtaaacaaagattaaggcgcctaatgacaggtgctgaaattaatgacct

SEQ ID NO: 4088 - DNA, 57 bp, synthetic construct
  misc_feature 1..57: note = oligonucleotide decoy
  source 1..57: mol_type = other DNA
aacagaaggtaaacaaagattaaggcgccttatgacaggtgctgaaattaatgacct

SEQ ID NO: 4089 - DNA, 57 bp, synthetic construct
  misc_feature 1..57: note = oligonucleotide decoy
  source 1..57: mol_type = other DNA
aacagaaggtaaacaaagattatggcgccaaatgacaggtgctgaaattaatgacct

SEQ ID NO: 4090 - DNA, 57 bp, synthetic construct
  misc_feature 1..57: note = oligonucleotide decoy
  source 1..57: mol_type = other DNA
aacagaaggtaaacaaagattatggcgccatatgacaggtgctgaaattaatgacct

SEQ ID NO: 4091 - DNA, 57 bp, synthetic construct
  misc_feature 1..57: note = oligonucleotide decoy
  source 1..57: mol_type = other DNA
aacagaaggtaaacaaagattatggcgcctaatgacaggtgctgaaattaatgacct

SEQ ID NO: 4092 - DNA, 57 bp, synthetic construct
  misc_feature 1..57: note = oligonucleotide decoy
  source 1..57: mol_type = other DNA
aacagaaggtaaacaaagattatggcgccttatgacaggtgctgaaattaatgacct

SEQ ID NO: 4093 - DNA, 57 bp, synthetic construct
  misc_feature 1..57: note = oligonucleotide decoy
  source 1..57: mol_type = other DNA
aacagaaggtaaacaaagattaaggcgccaaatgacaggtgctgaaattaatgaccc

SEQ ID NO: 4094 - DNA, 57 bp, synthetic construct
  misc_feature 1..57: note = oligonucleotide decoy
  source 1..57: mol_type = other DNA
aacagaaggtaaacaaagattaaggcgccaaatgacaggtgctgaaattaatgaccg

SEQ ID NO: 4095 - DNA, 57 bp, synthetic construct
  misc_feature 1..57: note = oligonucleotide decoy
  source 1..57: mol_type = other DNA
aacagaaggtaaacaaagattaaggcgccatatgacaggtgctgaaattaatgaccc

SEQ ID NO: 4096 - DNA, 57 bp, synthetic construct
  misc_feature 1..57: note = oligonucleotide decoy
  source 1..57: mol_type = other DNA
aacagaaggtaaacaaagattaaggcgccatatgacaggtgctgaaattaatgaccg

SEQ ID NO: 4097 - DNA, 57 bp, synthetic construct
  misc_feature 1..57: note = oligonucleotide decoy
  source 1..57: mol_type = other DNA
aacagaaggtaaacaaagattaaggcgcctaatgacaggtgctgaaattaatgaccc

SEQ ID NO: 4098 - DNA, 57 bp, synthetic construct
  misc_feature 1..57: note = oligonucleotide decoy
  source 1..57: mol_type = other DNA
aacagaaggtaaacaaagattaaggcgcctaatgacaggtgctgaaattaatgaccg

SEQ ID NO: 4099 - DNA, 57 bp, synthetic construct
  misc_feature 1..57: note = oligonucleotide decoy
  source 1..57: mol_type = other DNA
aacagaaggtaaacaaagattaaggcgccttatgacaggtgctgaaattaatgaccc

SEQ ID NO: 4100 - DNA, 57 bp, synthetic construct
  misc_feature 1..57: note = oligonucleotide decoy
  source 1..57: mol_type = other DNA
aacagaaggtaaacaaagattaaggcgccttatgacaggtgctgaaattaatgaccg

SEQ ID NO: 4101 - DNA, 57 bp, synthetic construct
  misc_feature 1..57: note = oligonucleotide decoy
  source 1..57: mol_type = other DNA
aacagaaggtaaacaaagattatggcgccaaatgacaggtgctgaaattaatgaccc

SEQ ID NO: 4102 - DNA, 57 bp, synthetic construct
  misc_feature 1..57: note = oligonucleotide decoy
  source 1..57: mol_type = other DNA
aacagaaggtaaacaaagattatggcgccaaatgacaggtgctgaaattaatgaccg

SEQ ID NO: 4103 - DNA, 57 bp, synthetic construct
  misc_feature 1..57: note = oligonucleotide decoy
  source 1..57: mol_type = other DNA
aacagaaggtaaacaaagattatggcgccatatgacaggtgctgaaattaatgaccc

SEQ ID NO: 4104 - DNA, 57 bp, synthetic construct
  misc_feature 1..57: note = oligonucleotide decoy
  source 1..57: mol_type = other DNA
aacagaaggtaaacaaagattatggcgccatatgacaggtgctgaaattaatgaccg

SEQ ID NO: 4105 - DNA, 57 bp, synthetic construct
  misc_feature 1..57: note = oligonucleotide decoy
  source 1..57: mol_type = other DNA
aacagaaggtaaacaaagattatggcgcctaatgacaggtgctgaaattaatgaccc

SEQ ID NO: 4106 - DNA, 57 bp, synthetic construct
  misc_feature 1..57: note = oligonucleotide decoy
  source 1..57: mol_type = other DNA
aacagaaggtaaacaaagattatggcgcctaatgacaggtgctgaaattaatgaccg

SEQ ID NO: 4107 - DNA, 57 bp, synthetic construct
  misc_feature 1..57: note = oligonucleotide decoy
  source 1..57: mol_type = other DNA
aacagaaggtaaacaaagattatggcgccttatgacaggtgctgaaattaatgaccc

SEQ ID NO: 4108 - DNA, 57 bp, synthetic construct
  misc_feature 1..57: note = oligonucleotide decoy
  source 1..57: mol_type = other DNA
aacagaaggtaaacaaagattatggcgccttatgacaggtgctgaaattaatgaccg

SEQ ID NO: 4109 - DNA, 57 bp, synthetic construct
  misc_feature 1..57: note = oligonucleotide decoy
  source 1..57: mol_type = other DNA
aacagaaggtaaacaaagattaaggcgccaaatgacaggtgctgatattaatggcct

SEQ ID NO: 4110 - DNA, 57 bp, synthetic construct
  misc_feature 1..57: note = oligonucleotide decoy
  source 1..57: mol_type = other DNA
aacagaaggtaaacaaagattaaggcgccatatgacaggtgctgatattaatggcct

SEQ ID NO: 4111 - DNA, 57 bp, synthetic construct
  misc_feature 1..57: note = oligonucleotide decoy
  source 1..57: mol_type = other DNA
aacagaaggtaaacaaagattaaggcgcctaatgacaggtgctgatattaatggcct

SEQ ID NO: 4112 - DNA, 57 bp, synthetic construct
  misc_feature 1..57: note = oligonucleotide decoy
  source 1..57: mol_type = other DNA
aacagaaggtaaacaaagattaaggcgccttatgacaggtgctgatattaatggcct

SEQ ID NO: 4113 - DNA, 57 bp, synthetic construct
  misc_feature 1..57: note = oligonucleotide decoy
  source 1..57: mol_type = other DNA
aacagaaggtaaacaaagattatggcgccaaatgacaggtgctgatattaatggcct

SEQ ID NO: 4114 - DNA, 57 bp, synthetic construct
  misc_feature 1..57: note = oligonucleotide decoy
  source 1..57: mol_type = other DNA
aacagaaggtaaacaaagattatggcgccatatgacaggtgctgatattaatggcct

SEQ ID NO: 4115 - DNA, 57 bp, synthetic construct
  misc_feature 1..57: note = oligonucleotide decoy
  source 1..57: mol_type = other DNA
aacagaaggtaaacaaagattatggcgcctaatgacaggtgctgatattaatggcct

SEQ ID NO: 4116 - DNA, 57 bp, synthetic construct
  misc_feature 1..57: note = oligonucleotide decoy
  source 1..57: mol_type = other DNA
aacagaaggtaaacaaagattatggcgccttatgacaggtgctgatattaatggcct

SEQ ID NO: 4117 - DNA, 57 bp, synthetic construct
  misc_feature 1..57: note = oligonucleotide decoy
  source 1..57: mol_type = other DNA
aacagaaggtaaacaaagattaaggcgccaaatgacaggtgctgatattaatggccc

SEQ ID NO: 4118 - DNA, 57 bp, synthetic construct
  misc_feature 1..57: note = oligonucleotide decoy
  source 1..57: mol_type = other DNA
aacagaaggtaaacaaagattaaggcgccaaatgacaggtgctgatattaatggccg

SEQ ID NO: 4119 - DNA, 57 bp, synthetic construct
  misc_feature 1..57: note = oligonucleotide decoy
  source 1..57: mol_type = other DNA
aacagaaggtaaacaaagattaaggcgccatatgacaggtgctgatattaatggccc

SEQ ID NO: 4120 - DNA, 57 bp, synthetic construct
  misc_feature 1..57: note = oligonucleotide decoy
  source 1..57: mol_type = other DNA
aacagaaggtaaacaaagattaaggcgccatatgacaggtgctgatattaatggccg

SEQ ID NO: 4121 - DNA, 57 bp, synthetic construct
  misc_feature 1..57: note = oligonucleotide decoy
  source 1..57: mol_type = other DNA
aacagaaggtaaacaaagattaaggcgcctaatgacaggtgctgatattaatggccc

SEQ ID NO: 4122 - DNA, 57 bp, synthetic construct
  misc_feature 1..57: note = oligonucleotide decoy
  source 1..57: mol_type = other DNA
aacagaaggtaaacaaagattaaggcgcctaatgacaggtgctgatattaatggccg

SEQ ID NO: 4123 - DNA, 57 bp, synthetic construct
  misc_feature 1..57: note = oligonucleotide decoy
  source 1..57: mol_type = other DNA
aacagaaggtaaacaaagattaaggcgccttatgacaggtgctgatattaatggccc

SEQ ID NO: 4124 - DNA, 57 bp, synthetic construct
  misc_feature 1..57: note = oligonucleotide decoy
  source 1..57: mol_type = other DNA
aacagaaggtaaacaaagattaaggcgccttatgacaggtgctgatattaatggccg

SEQ ID NO: 4125 - DNA, 57 bp, synthetic construct
  misc_feature 1..57: note = oligonucleotide decoy
  source 1..57: mol_type = other DNA
aacagaaggtaaacaaagattatggcgccaaatgacaggtgctgatattaatggccc

SEQ ID NO: 4126 - DNA, 57 bp, synthetic construct
  misc_feature 1..57: note = oligonucleotide decoy
  source 1..57: mol_type = other DNA
aacagaaggtaaacaaagattatggcgccaaatgacaggtgctgatattaatggccg

SEQ ID NO: 4127 - DNA, 57 bp, synthetic construct
  misc_feature 1..57: note = oligonucleotide decoy
  source 1..57: mol_type = other DNA
aacagaaggtaaacaaagattatggcgccatatgacaggtgctgatattaatggccc

SEQ ID NO: 4128 - DNA, 57 bp, synthetic construct
  misc_feature 1..57: note = oligonucleotide decoy
  source 1..57: mol_type = other DNA
aacagaaggtaaacaaagattatggcgccatatgacaggtgctgatattaatggccg

SEQ ID NO: 4129 - DNA, 57 bp, synthetic construct
  misc_feature 1..57: note = oligonucleotide decoy
  source 1..57: mol_type = other DNA
aacagaaggtaaacaaagattatggcgcctaatgacaggtgctgatattaatggccc

SEQ ID NO: 4130 - DNA, 57 bp, synthetic construct
  misc_feature 1..57: note = oligonucleotide decoy
  source 1..57: mol_type = other DNA
aacagaaggtaaacaaagattatggcgcctaatgacaggtgctgatattaatggccg

SEQ ID NO: 4131 - DNA, 57 bp, synthetic construct
  misc_feature 1..57: note = oligonucleotide decoy
  source 1..57: mol_type = other DNA
aacagaaggtaaacaaagattatggcgccttatgacaggtgctgatattaatggccc

SEQ ID NO: 4132 - DNA, 57 bp, synthetic construct
  misc_feature 1..57: note = oligonucleotide decoy
  source 1..57: mol_type = other DNA
aacagaaggtaaacaaagattatggcgccttatgacaggtgctgatattaatggccg

SEQ ID NO: 4133 - DNA, 57 bp, synthetic construct
  misc_feature 1..57: note = oligonucleotide decoy
  source 1..57: mol_type = other DNA
aacagaaggtaaacaaagattaaggcgccaaatgacaggtgctgaaattaatggcct

SEQ ID NO: 4134 - DNA, 57 bp, synthetic construct
  misc_feature 1..57: note = oligonucleotide decoy
  source 1..57: mol_type = other DNA
aacagaaggtaaacaaagattaaggcgccatatgacaggtgctgaaattaatggcct

SEQ ID NO: 4135 - DNA, 57 bp, synthetic construct
  misc_feature 1..57: note = oligonucleotide decoy
  source 1..57: mol_type = other DNA
aacagaaggtaaacaaagattaaggcgcctaatgacaggtgctgaaattaatggcct

SEQ ID NO: 4136 - DNA, 57 bp, synthetic construct
  misc_feature 1..57: note = oligonucleotide decoy
  source 1..57: mol_type = other DNA
aacagaaggtaaacaaagattaaggcgccttatgacaggtgctgaaattaatggcct

SEQ ID NO: 4137 - DNA, 57 bp, synthetic construct
  misc_feature 1..57: note = oligonucleotide decoy
  source 1..57: mol_type = other DNA
aacagaaggtaaacaaagattatggcgccaaatgacaggtgctgaaattaatggcct

SEQ ID NO: 4138 - DNA, 57 bp, synthetic construct
  misc_feature 1..57: note = oligonucleotide decoy
  source 1..57: mol_type = other DNA
aacagaaggtaaacaaagattatggcgccatatgacaggtgctgaaattaatggcct

SEQ ID NO: 4139 - DNA, 57 bp, synthetic construct
  misc_feature 1..57: note = oligonucleotide decoy
  source 1..57: mol_type = other DNA
aacagaaggtaaacaaagattatggcgcctaatgacaggtgctgaaattaatggcct

SEQ ID NO: 4140 - DNA, 57 bp, synthetic construct
  misc_feature 1..57: note = oligonucleotide decoy
  source 1..57: mol_type = other DNA
aacagaaggtaaacaaagattatggcgccttatgacaggtgctgaaattaatggcct

SEQ ID NO: 4141 - DNA, 57 bp, synthetic construct
  misc_feature 1..57: note = oligonucleotide decoy
  source 1..57: mol_type = other DNA
aacagaaggtaaacaaagattaaggcgccaaatgacaggtgctgaaattaatggccc

SEQ ID NO: 4142 - DNA, 57 bp, synthetic construct
  misc_feature 1..57: note = oligonucleotide decoy
  source 1..57: mol_type = other DNA
aacagaaggtaaacaaagattaaggcgccaaatgacaggtgctgaaattaatggccg

SEQ ID NO: 4143 - DNA, 57 bp, synthetic construct
  misc_feature 1..57: note = oligonucleotide decoy
  source 1..57: mol_type = other DNA
aacagaaggtaaacaaagattaaggcgccatatgacaggtgctgaaattaatggccc

SEQ ID NO: 4144 - DNA, 57 bp, synthetic construct
  misc_feature 1..57: note = oligonucleotide decoy
  source 1..57: mol_type = other DNA
aacagaaggtaaacaaagattaaggcgccatatgacaggtgctgaaattaatggccg

SEQ ID NO: 4145 - DNA, 57 bp, synthetic construct
  misc_feature 1..57: note = oligonucleotide decoy
  source 1..57: mol_type = other DNA
aacagaaggtaaacaaagattaaggcgcctaatgacaggtgctgaaattaatggccc

SEQ ID NO: 4146 - DNA, 57 bp, synthetic construct
  misc_feature 1..57: note = oligonucleotide decoy
  source 1..57: mol_type = other DNA
aacagaaggtaaacaaagattaaggcgcctaatgacaggtgctgaaattaatggccg

SEQ ID NO: 4147 - DNA, 57 bp, synthetic construct
  misc_feature 1..57: note = oligonucleotide decoy
  source 1..57: mol_type = other DNA
aacagaaggtaaacaaagattaaggcgccttatgacaggtgctgaaattaatggccc

SEQ ID NO: 4148 - DNA, 57 bp, synthetic construct
  misc_feature 1..57: note = oligonucleotide decoy
  source 1..57: mol_type = other DNA
aacagaaggtaaacaaagattaaggcgccttatgacaggtgctgaaattaatggccg

SEQ ID NO: 4149 - DNA, 57 bp, synthetic construct
  misc_feature 1..57: note = oligonucleotide decoy
  source 1..57: mol_type = other DNA
aacagaaggtaaacaaagattatggcgccaaatgacaggtgctgaaattaatggccc

SEQ ID NO: 4150 - DNA, 57 bp, synthetic construct
  misc_feature 1..57: note = oligonucleotide decoy
  source 1..57: mol_type = other DNA
aacagaaggtaaacaaagattatggcgccaaatgacaggtgctgaaattaatggccg

SEQ ID NO: 4151 - DNA, 57 bp, synthetic construct
  misc_feature 1..57: note = oligonucleotide decoy
  source 1..57: mol_type = other DNA
aacagaaggtaaacaaagattatggcgccatatgacaggtgctgaaattaatggccc

SEQ ID NO: 4152 - DNA, 57 bp, synthetic construct
  misc_feature 1..57: note = oligonucleotide decoy
  source 1..57: mol_type = other DNA
aacagaaggtaaacaaagattatggcgccatatgacaggtgctgaaattaatggccg

SEQ ID NO: 4153 - DNA, 57 bp, synthetic construct
  misc_feature 1..57: note = oligonucleotide decoy
  source 1..57: mol_type = other DNA
aacagaaggtaaacaaagattatggcgcctaatgacaggtgctgaaattaatggccc

SEQ ID NO: 4154 - DNA, 57 bp, synthetic construct
  misc_feature 1..57: note = oligonucleotide decoy
  source 1..57: mol_type = other DNA
aacagaaggtaaacaaagattatggcgcctaatgacaggtgctgaaattaatggccg

SEQ ID NO: 4155 - DNA, 57 bp, synthetic construct
  misc_feature 1..57: note = oligonucleotide decoy
  source 1..57: mol_type = other DNA
aacagaaggtaaacaaagattatggcgccttatgacaggtgctgaaattaatggccc

SEQ ID NO: 4156 - DNA, 57 bp, synthetic construct
  misc_feature 1..57: note = oligonucleotide decoy
  source 1..57: mol_type = other DNA
aacagaaggtaaacaaagattatggcgccttatgacaggtgctgaaattaatggccg

SEQ ID NO: 4157 - DNA, 57 bp, synthetic construct
  misc_feature 1..57: note = oligonucleotide decoy
  source 1..57: mol_type = other DNA
aaaaggcgccataatctttgtttaccttctgttgacaggtgctgatattaatgacct

SEQ ID NO: 4158 - DNA, 57 bp, synthetic construct
  misc_feature 1..57: note = oligonucleotide decoy
  source 1..57: mol_type = other DNA
aaaaggcgccttaatctttgtttaccttctgttgacaggtgctgatattaatgacct

SEQ ID NO: 4159 - DNA, 57 bp, synthetic construct
  misc_feature 1..57: note = oligonucleotide decoy
  source 1..57: mol_type = other DNA
aaatggcgccataatctttgtttaccttctgttgacaggtgctgatattaatgacct

SEQ ID NO: 4160 - DNA, 57 bp, synthetic construct
  misc_feature 1..57: note = oligonucleotide decoy
  source 1..57: mol_type = other DNA
aaatggcgccttaatctttgtttaccttctgttgacaggtgctgatattaatgacct

SEQ ID NO: 4161 - DNA, 57 bp, synthetic construct
  misc_feature 1..57: note = oligonucleotide decoy
  source 1..57: mol_type = other DNA
aataggcgccataatctttgtttaccttctgttgacaggtgctgatattaatgacct

SEQ ID NO: 4162 - DNA, 57 bp, synthetic construct
  misc_feature 1..57: note = oligonucleotide decoy
  source 1..57: mol_type = other DNA
aataggcgccttaatctttgtttaccttctgttgacaggtgctgatattaatgacct

SEQ ID NO: 4163 - DNA, 57 bp, synthetic construct
  misc_feature 1..57: note = oligonucleotide decoy
  source 1..57: mol_type = other DNA
aattggcgccataatctttgtttaccttctgttgacaggtgctgatattaatgacct

SEQ ID NO: 4164 - DNA, 57 bp, synthetic construct
  misc_feature 1..57: note = oligonucleotide decoy
  source 1..57: mol_type = other DNA
aattggcgccttaatctttgtttaccttctgttgacaggtgctgatattaatgacct

SEQ ID NO: 4165 - DNA, 57 bp, synthetic construct
  misc_feature 1..57: note = oligonucleotide decoy
  source 1..57: mol_type = other DNA
ataaggcgccataatctttgtttaccttctgttgacaggtgctgatattaatgacct

SEQ ID NO: 4166 - DNA, 57 bp, synthetic construct
  misc_feature 1..57: note = oligonucleotide decoy
  source 1..57: mol_type = other DNA
ataaggcgccttaatctttgtttaccttctgttgacaggtgctgatattaatgacct

SEQ ID NO: 4167 - DNA, 57 bp, synthetic construct
  misc_feature 1..57: note = oligonucleotide decoy
  source 1..57: mol_type = other DNA
atatggcgccataatctttgtttaccttctgttgacaggtgctgatattaatgacct

SEQ ID NO: 4168 - DNA, 57 bp, synthetic construct
  misc_feature 1..57: note = oligonucleotide decoy
  source 1..57: mol_type = other DNA
atatggcgccttaatctttgtttaccttctgttgacaggtgctgatattaatgacct

SEQ ID NO: 4169 - DNA, 57 bp, synthetic construct
  misc_feature 1..57: note = oligonucleotide decoy
  source 1..57: mol_type = other DNA
attaggcgccataatctttgtttaccttctgttgacaggtgctgatattaatgacct

SEQ ID NO: 4170 - DNA, 57 bp, synthetic construct
  misc_feature 1..57: note = oligonucleotide decoy
  source 1..57: mol_type = other DNA
attaggcgccttaatctttgtttaccttctgttgacaggtgctgatattaatgacct

SEQ ID NO: 4171 - DNA, 57 bp, synthetic construct
  misc_feature 1..57: note = oligonucleotide decoy
  source 1..57: mol_type = other DNA
atttggcgccataatctttgtttaccttctgttgacaggtgctgatattaatgacct

SEQ ID NO: 4172 - DNA, 57 bp, synthetic construct
  misc_feature 1..57: note = oligonucleotide decoy
  source 1..57: mol_type = other DNA
atttggcgccttaatctttgtttaccttctgttgacaggtgctgatattaatgacct

SEQ ID NO: 4173 - DNA, 57 bp, synthetic construct
  misc_feature 1..57: note = oligonucleotide decoy
  source 1..57: mol_type = other DNA
taaaggcgccataatctttgtttaccttctgttgacaggtgctgatattaatgacct

SEQ ID NO: 4174 - DNA, 57 bp, synthetic construct
  misc_feature 1..57: note = oligonucleotide decoy
  source 1..57: mol_type = other DNA
taaaggcgccttaatctttgtttaccttctgttgacaggtgctgatattaatgacct

SEQ ID NO: 4175 - DNA, 57 bp, synthetic construct
  misc_feature 1..57: note = oligonucleotide decoy
  source 1..57: mol_type = other DNA
taatggcgccataatctttgtttaccttctgttgacaggtgctgatattaatgacct

SEQ ID NO: 4176 - DNA, 57 bp, synthetic construct
  misc_feature 1..57: note = oligonucleotide decoy
  source 1..57: mol_type = other DNA
taatggcgccttaatctttgtttaccttctgttgacaggtgctgatattaatgacct

SEQ ID NO: 4177 - DNA, 57 bp, synthetic construct
  misc_feature 1..57: note = oligonucleotide decoy
  source 1..57: mol_type = other DNA
tataggcgccataatctttgtttaccttctgttgacaggtgctgatattaatgacct

SEQ ID NO: 4178 - DNA, 57 bp, synthetic construct
  misc_feature 1..57: note = oligonucleotide decoy
  source 1..57: mol_type = other DNA
tataggcgccttaatctttgtttaccttctgttgacaggtgctgatattaatgacct

SEQ ID NO: 4179 - DNA, 57 bp, synthetic construct
  misc_feature 1..57: note = oligonucleotide decoy
  source 1..57: mol_type = other DNA
tattggcgccataatctttgtttaccttctgttgacaggtgctgatattaatgacct

SEQ ID NO: 4180 - DNA, 57 bp, synthetic construct
  misc_feature 1..57: note = oligonucleotide decoy
  source 1..57: mol_type = other DNA
tattggcgccttaatctttgtttaccttctgttgacaggtgctgatattaatgacct

SEQ ID NO: 4181 - DNA, 57 bp, synthetic construct
  misc_feature 1..57: note = oligonucleotide decoy
  source 1..57: mol_type = other DNA
ttaaggcgccataatctttgtttaccttctgttgacaggtgctgatattaatgacct

SEQ ID NO: 4182 - DNA, 57 bp, synthetic construct
  misc_feature 1..57: note = oligonucleotide decoy
  source 1..57: mol_type = other DNA
ttaaggcgccttaatctttgtttaccttctgttgacaggtgctgatattaatgacct

SEQ ID NO: 4183 - DNA, 57 bp, synthetic construct
  misc_feature 1..57: note = oligonucleotide decoy
  source 1..57: mol_type = other DNA
ttatggcgccataatctttgtttaccttctgttgacaggtgctgatattaatgacct

SEQ ID NO: 4184 - DNA, 57 bp, synthetic construct
  misc_feature 1..57: note = oligonucleotide decoy
  source 1..57: mol_type = other DNA
ttatggcgccttaatctttgtttaccttctgttgacaggtgctgatattaatgacct

SEQ ID NO: 4185 - DNA, 57 bp, synthetic construct
  misc_feature 1..57: note = oligonucleotide decoy
  source 1..57: mol_type = other DNA
tttaggcgccataatctttgtttaccttctgttgacaggtgctgatattaatgacct

SEQ ID NO: 4186 - DNA, 57 bp, synthetic construct
  misc_feature 1..57: note = oligonucleotide decoy
  source 1..57: mol_type = other DNA
tttaggcgccttaatctttgtttaccttctgttgacaggtgctgatattaatgacct

SEQ ID NO: 4187 - DNA, 57 bp, synthetic construct
  misc_feature 1..57: note = oligonucleotide decoy
  source 1..57: mol_type = other DNA
ttttggcgccataatctttgtttaccttctgttgacaggtgctgatattaatgacct

SEQ ID NO: 4188 - DNA, 57 bp, synthetic construct
  misc_feature 1..57: note = oligonucleotide decoy
  source 1..57: mol_type = other DNA
ttttggcgccttaatctttgtttaccttctgttgacaggtgctgatattaatgacct

SEQ ID NO: 4189 - DNA, 57 bp, synthetic construct
  misc_feature 1..57: note = oligonucleotide decoy
  source 1..57: mol_type = other DNA
aaaaggcgccataatctttgtttaccttctgttgacaggtgctgatattaatgaccc

SEQ ID NO: 4190 - DNA, 57 bp, synthetic construct
  misc_feature 1..57: note = oligonucleotide decoy
  source 1..57: mol_type = other DNA
aaaaggcgccataatctttgtttaccttctgttgacaggtgctgatattaatgaccg

SEQ ID NO: 4191 - DNA, 57 bp, synthetic construct
  misc_feature 1..57: note = oligonucleotide decoy
  source 1..57: mol_type = other DNA
aaaaggcgccttaatctttgtttaccttctgttgacaggtgctgatattaatgaccc

SEQ ID NO: 4192 - DNA, 57 bp, synthetic construct
  misc_feature 1..57: note = oligonucleotide decoy
  source 1..57: mol_type = other DNA
aaaaggcgccttaatctttgtttaccttctgttgacaggtgctgatattaatgaccg

SEQ ID NO: 4193 - DNA, 57 bp, synthetic construct
  misc_feature 1..57: note = oligonucleotide decoy
  source 1..57: mol_type = other DNA
aaatggcgccataatctttgtttaccttctgttgacaggtgctgatattaatgaccc

SEQ ID NO: 4194 - DNA, 57 bp, synthetic construct
  misc_feature 1..57: note = oligonucleotide decoy
  source 1..57: mol_type = other DNA
aaatggcgccataatctttgtttaccttctgttgacaggtgctgatattaatgaccg

SEQ ID NO: 4195 - DNA, 57 bp, synthetic construct
  misc_feature 1..57: note = oligonucleotide decoy
  source 1..57: mol_type = other DNA
aaatggcgccttaatctttgtttaccttctgttgacaggtgctgatattaatgaccc

SEQ ID NO: 4196 - DNA, 57 bp, synthetic construct
  misc_feature 1..57: note = oligonucleotide decoy
  source 1..57: mol_type = other DNA
aaatggcgccttaatctttgtttaccttctgttgacaggtgctgatattaatgaccg

SEQ ID NO: 4197 - DNA, 57 bp, synthetic construct
  misc_feature 1..57: note = oligonucleotide decoy
  source 1..57: mol_type = other DNA
aataggcgccataatctttgtttaccttctgttgacaggtgctgatattaatgaccc

SEQ ID NO: 4198 - DNA, 57 bp, synthetic construct
  misc_feature 1..57: note = oligonucleotide decoy
  source 1..57: mol_type = other DNA
aataggcgccataatctttgtttaccttctgttgacaggtgctgatattaatgaccg

SEQ ID NO: 4199 - DNA, 57 bp, synthetic construct
  misc_feature 1..57: note = oligonucleotide decoy
  source 1..57: mol_type = other DNA
aataggcgccttaatctttgtttaccttctgttgacaggtgctgatattaatgaccc

SEQ ID NO: 4200 - DNA, 57 bp, synthetic construct
  misc_feature 1..57: note = oligonucleotide decoy
  source 1..57: mol_type = other DNA
aataggcgccttaatctttgtttaccttctgttgacaggtgctgatattaatgaccg

SEQ ID NO: 4201 - DNA, 57 bp, synthetic construct
  misc_feature 1..57: note = oligonucleotide decoy
  source 1..57: mol_type = other DNA
aattggcgccataatctttgtttaccttctgttgacaggtgctgatattaatgaccc

SEQ ID NO: 4202 - DNA, 57 bp, synthetic construct
  misc_feature 1..57: note = oligonucleotide decoy
  source 1..57: mol_type = other DNA
aattggcgccataatctttgtttaccttctgttgacaggtgctgatattaatgaccg

SEQ ID NO: 4203 - DNA, 57 bp, synthetic construct
  misc_feature 1..57: note = oligonucleotide decoy
  source 1..57: mol_type = other DNA
aattggcgccttaatctttgtttaccttctgttgacaggtgctgatattaatgaccc

SEQ ID NO: 4204 - DNA, 57 bp, synthetic construct
  misc_feature 1..57: note = oligonucleotide decoy
  source 1..57: mol_type = other DNA
aattggcgccttaatctttgtttaccttctgttgacaggtgctgatattaatgaccg

SEQ ID NO: 4205 - DNA, 57 bp, synthetic construct
  misc_feature 1..57: note = oligonucleotide decoy
  source 1..57: mol_type = other DNA
ataaggcgccataatctttgtttaccttctgttgacaggtgctgatattaatgaccc

SEQ ID NO: 4206 - DNA, 57 bp, synthetic construct
  misc_feature 1..57: note = oligonucleotide decoy
  source 1..57: mol_type = other DNA
ataaggcgccataatctttgtttaccttctgttgacaggtgctgatattaatgaccg

SEQ ID NO: 4207 - DNA, 57 bp, synthetic construct
  misc_feature 1..57: note = oligonucleotide decoy
  source 1..57: mol_type = other DNA
ataaggcgccttaatctttgtttaccttctgttgacaggtgctgatattaatgaccc

SEQ ID NO: 4208 - DNA, 57 bp, synthetic construct
  misc_feature 1..57: note = oligonucleotide decoy
  source 1..57: mol_type = other DNA
ataaggcgccttaatctttgtttaccttctgttgacaggtgctgatattaatgaccg

SEQ ID NO: 4209 - DNA, 57 bp, synthetic construct
  misc_feature 1..57: note = oligonucleotide decoy
  source 1..57: mol_type = other DNA
atatggcgccataatctttgtttaccttctgttgacaggtgctgatattaatgaccc

SEQ ID NO: 4210 - DNA, 57 bp, synthetic construct
  misc_feature 1..57: note = oligonucleotide decoy
  source 1..57: mol_type = other DNA
atatggcgccataatctttgtttaccttctgttgacaggtgctgatattaatgaccg

SEQ ID NO: 4211 - DNA, 57 bp, synthetic construct
  misc_feature 1..57: note = oligonucleotide decoy
  source 1..57: mol_type = other DNA
atatggcgccttaatctttgtttaccttctgttgacaggtgctgatattaatgaccc

SEQ ID NO: 4212 - DNA, 57 bp, synthetic construct
  misc_feature 1..57: note = oligonucleotide decoy
  source 1..57: mol_type = other DNA
atatggcgccttaatctttgtttaccttctgttgacaggtgctgatattaatgaccg

SEQ ID NO: 4213 - DNA, 57 bp, synthetic construct
  misc_feature 1..57: note = oligonucleotide decoy
  source 1..57: mol_type = other DNA
attaggcgccataatctttgtttaccttctgttgacaggtgctgatattaatgaccc

SEQ ID NO: 4214 - DNA, 57 bp, synthetic construct
  misc_feature 1..57: note = oligonucleotide decoy
  source 1..57: mol_type = other DNA
attaggcgccataatctttgtttaccttctgttgacaggtgctgatattaatgaccg

SEQ ID NO: 4215 - DNA, 57 bp, synthetic construct
  misc_feature 1..57: note = oligonucleotide decoy
  source 1..57: mol_type = other DNA
attaggcgccttaatctttgtttaccttctgttgacaggtgctgatattaatgaccc

SEQ ID NO: 4216 - DNA, 57 bp, synthetic construct
  misc_feature 1..57: note = oligonucleotide decoy
  source 1..57: mol_type = other DNA
attaggcgccttaatctttgtttaccttctgttgacaggtgctgatattaatgaccg

SEQ ID NO: 4217 - DNA, 57 bp, synthetic construct
  misc_feature 1..57: note = oligonucleotide decoy
  source 1..57: mol_type = other DNA
atttggcgccataatctttgtttaccttctgttgacaggtgctgatattaatgaccc

SEQ ID NO: 4218 - DNA, 57 bp, synthetic construct
  misc_feature 1..57: note = oligonucleotide decoy
  source 1..57: mol_type = other DNA
atttggcgccataatctttgtttaccttctgttgacaggtgctgatattaatgaccg

SEQ ID NO: 4219 - DNA, 57 bp, synthetic construct
  misc_feature 1..57: note = oligonucleotide decoy
  source 1..57: mol_type = other DNA
atttggcgccttaatctttgtttaccttctgttgacaggtgctgatattaatgaccc

SEQ ID NO: 4220 - DNA, 57 bp, synthetic construct
  misc_feature 1..57: note = oligonucleotide decoy
  source 1..57: mol_type = other DNA
atttggcgccttaatctttgtttaccttctgttgacaggtgctgatattaatgaccg

SEQ ID NO: 4221 - DNA, 57 bp, synthetic construct
  misc_feature 1..57: note = oligonucleotide decoy
  source 1..57: mol_type = other DNA
taaaggcgccataatctttgtttaccttctgttgacaggtgctgatattaatgaccc

SEQ ID NO: 4222 - DNA, 57 bp, synthetic construct
  misc_feature 1..57: note = oligonucleotide decoy
  source 1..57: mol_type = other DNA
taaaggcgccataatctttgtttaccttctgttgacaggtgctgatattaatgaccg

SEQ ID NO: 4223 - DNA, 57 bp, synthetic construct
  misc_feature 1..57: note = oligonucleotide decoy
  source 1..57: mol_type = other DNA
taaaggcgccttaatctttgtttaccttctgttgacaggtgctgatattaatgaccc

SEQ ID NO: 4224 - DNA, 57 bp, synthetic construct
  misc_feature 1..57: note = oligonucleotide decoy
  source 1..57: mol_type = other DNA
taaaggcgccttaatctttgtttaccttctgttgacaggtgctgatattaatgaccg

SEQ ID NO: 4225 - DNA, 57 bp, synthetic construct
  misc_feature 1..57: note = oligonucleotide decoy
  source 1..57: mol_type = other DNA
taatggcgccataatctttgtttaccttctgttgacaggtgctgatattaatgaccc

SEQ ID NO: 4226 - DNA, 57 bp, synthetic construct
  misc_feature 1..57: note = oligonucleotide decoy
  source 1..57: mol_type = other DNA
taatggcgccataatctttgtttaccttctgttgacaggtgctgatattaatgaccg

SEQ ID NO: 4227 - DNA, 57 bp, synthetic construct
  misc_feature 1..57: note = oligonucleotide decoy
  source 1..57: mol_type = other DNA
taatggcgccttaatctttgtttaccttctgttgacaggtgctgatattaatgaccc

SEQ ID NO: 4228 - DNA, 57 bp, synthetic construct
  misc_feature 1..57: note = oligonucleotide decoy
  source 1..57: mol_type = other DNA
taatggcgccttaatctttgtttaccttctgttgacaggtgctgatattaatgaccg

SEQ ID NO: 4229 - DNA, 57 bp, synthetic construct
  misc_feature 1..57: note = oligonucleotide decoy
  source 1..57: mol_type = other DNA
tataggcgccataatctttgtttaccttctgttgacaggtgctgatattaatgaccc

SEQ ID NO: 4230 - DNA, 57 bp, synthetic construct
  misc_feature 1..57: note = oligonucleotide decoy
  source 1..57: mol_type = other DNA
tataggcgccataatctttgtttaccttctgttgacaggtgctgatattaatgaccg

SEQ ID NO: 4231 - DNA, 57 bp, synthetic construct
  misc_feature 1..57: note = oligonucleotide decoy
  source 1..57: mol_type = other DNA
tataggcgccttaatctttgtttaccttctgttgacaggtgctgatattaatgaccc

SEQ ID NO: 4232 - DNA, 57 bp, synthetic construct
  misc_feature 1..57: note = oligonucleotide decoy
  source 1..57: mol_type = other DNA
tataggcgccttaatctttgtttaccttctgttgacaggtgctgatattaatgaccg

SEQ ID NO: 4233 - DNA, 57 bp, synthetic construct
  misc_feature 1..57: note = oligonucleotide decoy
  source 1..57: mol_type = other DNA
tattggcgccataatctttgtttaccttctgttgacaggtgctgatattaatgaccc

SEQ ID NO: 4234 - DNA, 57 bp, synthetic construct
  misc_feature 1..57: note = oligonucleotide decoy
  source 1..57: mol_type = other DNA
tattggcgccataatctttgtttaccttctgttgacaggtgctgatattaatgaccg

SEQ ID NO: 4235 - DNA, 57 bp, synthetic construct
  misc_feature 1..57: note = oligonucleotide decoy
  source 1..57: mol_type = other DNA
tattggcgccttaatctttgtttaccttctgttgacaggtgctgatattaatgaccc

SEQ ID NO: 4236 - DNA, 57 bp, synthetic construct
  misc_feature 1..57: note = oligonucleotide decoy
  source 1..57: mol_type = other DNA
tattggcgccttaatctttgtttaccttctgttgacaggtgctgatattaatgaccg

SEQ ID NO: 4237 - DNA, 57 bp, synthetic construct
  misc_feature 1..57: note = oligonucleotide decoy
  source 1..57: mol_type = other DNA
ttaaggcgccataatctttgtttaccttctgttgacaggtgctgatattaatgaccc

SEQ ID NO: 4238 - DNA, 57 bp, synthetic construct
  misc_feature 1..57: note = oligonucleotide decoy
  source 1..57: mol_type = other DNA
ttaaggcgccataatctttgtttaccttctgttgacaggtgctgatattaatgaccg

SEQ ID NO: 4239 - DNA, 57 bp, synthetic construct
  misc_feature 1..57: note = oligonucleotide decoy
  source 1..57: mol_type = other DNA
ttaaggcgccttaatctttgtttaccttctgttgacaggtgctgatattaatgaccc

SEQ ID NO: 4240 - DNA, 57 bp, synthetic construct
  misc_feature 1..57: note = oligonucleotide decoy
  source 1..57: mol_type = other DNA
ttaaggcgccttaatctttgtttaccttctgttgacaggtgctgatattaatgaccg

SEQ ID NO: 4241 - DNA, 57 bp, synthetic construct
  misc_feature 1..57: note = oligonucleotide decoy
  source 1..57: mol_type = other DNA
ttatggcgccataatctttgtttaccttctgttgacaggtgctgatattaatgaccc

SEQ ID NO: 4242 - DNA, 57 bp, synthetic construct
  misc_feature 1..57: note = oligonucleotide decoy
  source 1..57: mol_type = other DNA
ttatggcgccataatctttgtttaccttctgttgacaggtgctgatattaatgaccg

SEQ ID NO: 4243 - DNA, 57 bp, synthetic construct
  misc_feature 1..57: note = oligonucleotide decoy
  source 1..57: mol_type = other DNA
ttatggcgccttaatctttgtttaccttctgttgacaggtgctgatattaatgaccc

SEQ ID NO: 4244 - DNA, 57 bp, synthetic construct
  misc_feature 1..57: note = oligonucleotide decoy
  source 1..57: mol_type = other DNA
ttatggcgccttaatctttgtttaccttctgttgacaggtgctgatattaatgaccg

SEQ ID NO: 4245 - DNA, 57 bp, synthetic construct
  misc_feature 1..57: note = oligonucleotide decoy
  source 1..57: mol_type = other DNA
tttaggcgccataatctttgtttaccttctgttgacaggtgctgatattaatgaccc

SEQ ID NO: 4246 - DNA, 57 bp, synthetic construct
  misc_feature 1..57: note = oligonucleotide decoy
  source 1..57: mol_type = other DNA
tttaggcgccataatctttgtttaccttctgttgacaggtgctgatattaatgaccg

SEQ ID NO: 4247 - DNA, 57 bp, synthetic construct
  misc_feature 1..57: note = oligonucleotide decoy
  source 1..57: mol_type = other DNA
tttaggcgccttaatctttgtttaccttctgttgacaggtgctgatattaatgaccc

SEQ ID NO: 4248 - DNA, 57 bp, synthetic construct
  misc_feature 1..57: note = oligonucleotide decoy
  source 1..57: mol_type = other DNA
tttaggcgccttaatctttgtttaccttctgttgacaggtgctgatattaatgaccg

SEQ ID NO: 4249 - DNA, 57 bp, synthetic construct
  misc_feature 1..57: note = oligonucleotide decoy
  source 1..57: mol_type = other DNA
ttttggcgccataatctttgtttaccttctgttgacaggtgctgatattaatgaccc

SEQ ID NO: 4250 - DNA, 57 bp, synthetic construct
  misc_feature 1..57: note = oligonucleotide decoy
  source 1..57: mol_type = other DNA
ttttggcgccataatctttgtttaccttctgttgacaggtgctgatattaatgaccg

SEQ ID NO: 4251 - DNA, 57 bp, synthetic construct
  misc_feature 1..57: note = oligonucleotide decoy
  source 1..57: mol_type = other DNA
ttttggcgccttaatctttgtttaccttctgttgacaggtgctgatattaatgaccc

SEQ ID NO: 4252 - DNA, 57 bp, synthetic construct
  misc_feature 1..57: note = oligonucleotide decoy
  source 1..57: mol_type = other DNA
ttttggcgccttaatctttgtttaccttctgttgacaggtgctgatattaatgaccg

SEQ ID NO: 4253 - DNA, 57 bp, synthetic construct
  misc_feature 1..57: note = oligonucleotide decoy
  source 1..57: mol_type = other DNA
aaaaggcgccataatctttgtttaccttctgttgacaggtgctgaaattaatgacct

SEQ ID NO: 4254 - DNA, 57 bp, synthetic construct
  misc_feature 1..57: note = oligonucleotide decoy
  source 1..57: mol_type = other DNA
aaaaggcgccttaatctttgtttaccttctgttgacaggtgctgaaattaatgacct

SEQ ID NO: 4255 - DNA, 57 bp, synthetic construct
  misc_feature 1..57: note = oligonucleotide decoy
  source 1..57: mol_type = other DNA
aaatggcgccataatctttgtttaccttctgttgacaggtgctgaaattaatgacct

SEQ ID NO: 4256 - DNA, 57 bp, synthetic construct
  misc_feature 1..57: note = oligonucleotide decoy
  source 1..57: mol_type = other DNA
aaatggcgccttaatctttgtttaccttctgttgacaggtgctgaaattaatgacct

SEQ ID NO: 4257 - DNA, 57 bp, synthetic construct
  misc_feature 1..57: note = oligonucleotide decoy
  source 1..57: mol_type = other DNA
aataggcgccataatctttgtttaccttctgttgacaggtgctgaaattaatgacct

SEQ ID NO: 4258 - DNA, 57 bp, synthetic construct
  misc_feature 1..57: note = oligonucleotide decoy
  source 1..57: mol_type = other DNA
aataggcgccttaatctttgtttaccttctgttgacaggtgctgaaattaatgacct

SEQ ID NO: 4259 - DNA, 57 bp, synthetic construct
  misc_feature 1..57: note = oligonucleotide decoy
  source 1..57: mol_type = other DNA
aattggcgccataatctttgtttaccttctgttgacaggtgctgaaattaatgacct

SEQ ID NO: 4260 - DNA, 57 bp, synthetic construct
  misc_feature 1..57: note = oligonucleotide decoy
  source 1..57: mol_type = other DNA
aattggcgccttaatctttgtttaccttctgttgacaggtgctgaaattaatgacct

SEQ ID NO: 4261 - DNA, 57 bp, synthetic construct
  misc_feature 1..57: note = oligonucleotide decoy
  source 1..57: mol_type = other DNA
ataaggcgccataatctttgtttaccttctgttgacaggtgctgaaattaatgacct

SEQ ID NO: 4262 - DNA, 57 bp, synthetic construct
  misc_feature 1..57: note = oligonucleotide decoy
  source 1..57: mol_type = other DNA
ataaggcgccttaatctttgtttaccttctgttgacaggtgctgaaattaatgacct

SEQ ID NO: 4263 - DNA, 57 bp, synthetic construct
  misc_feature 1..57: note = oligonucleotide decoy
  source 1..57: mol_type = other DNA
atatggcgccataatctttgtttaccttctgttgacaggtgctgaaattaatgacct

SEQ ID NO: 4264 - DNA, 57 bp, synthetic construct
  misc_feature 1..57: note = oligonucleotide decoy
  source 1..57: mol_type = other DNA
atatggcgccttaatctttgtttaccttctgttgacaggtgctgaaattaatgacct

SEQ ID NO: 4265 - DNA, 57 bp, synthetic construct
  misc_feature 1..57: note = oligonucleotide decoy
  source 1..57: mol_type = other DNA
attaggcgccataatctttgtttaccttctgttgacaggtgctgaaattaatgacct

SEQ ID NO: 4266 - DNA, 57 bp, synthetic construct
  misc_feature 1..57: note = oligonucleotide decoy
  source 1..57: mol_type = other DNA
attaggcgccttaatctttgtttaccttctgttgacaggtgctgaaattaatgacct

SEQ ID NO: 4267 - DNA, 57 bp, synthetic construct
  misc_feature 1..57: note = oligonucleotide decoy
  source 1..57: mol_type = other DNA
atttggcgccataatctttgtttaccttctgttgacaggtgctgaaattaatgacct

SEQ ID NO: 4268 - DNA, 57 bp, synthetic construct
  misc_feature 1..57: note = oligonucleotide decoy
  source 1..57: mol_type = other DNA
atttggcgccttaatctttgtttaccttctgttgacaggtgctgaaattaatgacct

SEQ ID NO: 4269 - DNA, 57 bp, synthetic construct
  misc_feature 1..57: note = oligonucleotide decoy
  source 1..57: mol_type = other DNA
taaaggcgccataatctttgtttaccttctgttgacaggtgctgaaattaatgacct

SEQ ID NO: 4270 - DNA, 57 bp, synthetic construct
  misc_feature 1..57: note = oligonucleotide decoy
  source 1..57: mol_type = other DNA
taaaggcgccttaatctttgtttaccttctgttgacaggtgctgaaattaatgacct

SEQ ID NO: 4271 - DNA, 57 bp, synthetic construct
  misc_feature 1..57: note = oligonucleotide decoy
  source 1..57: mol_type = other DNA
taatggcgccataatctttgtttaccttctgttgacaggtgctgaaattaatgacct

SEQ ID NO: 4272 - DNA, 57 bp, synthetic construct
  misc_feature 1..57: note = oligonucleotide decoy
  source 1..57: mol_type = other DNA
taatggcgccttaatctttgtttaccttctgttgacaggtgctgaaattaatgacct

SEQ ID NO: 4273 - DNA, 57 bp, synthetic construct
  misc_feature 1..57: note = oligonucleotide decoy
  source 1..57: mol_type = other DNA
tataggcgccataatctttgtttaccttctgttgacaggtgctgaaattaatgacct

SEQ ID NO: 4274 - DNA, 57 bp, synthetic construct
  misc_feature 1..57: note = oligonucleotide decoy
  source 1..57: mol_type = other DNA
tataggcgccttaatctttgtttaccttctgttgacaggtgctgaaattaatgacct

SEQ ID NO: 4275 - DNA, 57 bp, synthetic construct
  misc_feature 1..57: note = oligonucleotide decoy
  source 1..57: mol_type = other DNA
tattggcgccataatctttgtttaccttctgttgacaggtgctgaaattaatgacct

SEQ ID NO: 4276 - DNA, 57 bp, synthetic construct
  misc_feature 1..57: note = oligonucleotide decoy
  source 1..57: mol_type = other DNA
tattggcgccttaatctttgtttaccttctgttgacaggtgctgaaattaatgacct

SEQ ID NO: 4277 - DNA, 57 bp, synthetic construct
  misc_feature 1..57: note = oligonucleotide decoy
  source 1..57: mol_type = other DNA
ttaaggcgccataatctttgtttaccttctgttgacaggtgctgaaattaatgacct

SEQ ID NO: 4278 - DNA, 57 bp, synthetic construct
  misc_feature 1..57: note = oligonucleotide decoy
  source 1..57: mol_type = other DNA
ttaaggcgccttaatctttgtttaccttctgttgacaggtgctgaaattaatgacct

SEQ ID NO: 4279 - DNA, 57 bp, synthetic construct
  misc_feature 1..57: note = oligonucleotide decoy
  source 1..57: mol_type = other DNA
ttatggcgccataatctttgtttaccttctgttgacaggtgctgaaattaatgacct

SEQ ID NO: 4280 - DNA, 57 bp, synthetic construct
  misc_feature 1..57: note = oligonucleotide decoy
  source 1..57: mol_type = other DNA
ttatggcgccttaatctttgtttaccttctgttgacaggtgctgaaattaatgacct

SEQ ID NO: 4281 - DNA, 57 bp, synthetic construct
  misc_feature 1..57: note = oligonucleotide decoy
  source 1..57: mol_type = other DNA
tttaggcgccataatctttgtttaccttctgttgacaggtgctgaaattaatgacct

SEQ ID NO: 4282 - DNA, 57 bp, synthetic construct
  misc_feature 1..57: note = oligonucleotide decoy
  source 1..57: mol_type = other DNA
tttaggcgccttaatctttgtttaccttctgttgacaggtgctgaaattaatgacct

SEQ ID NO: 4283 - DNA, 57 bp, synthetic construct
  misc_feature 1..57: note = oligonucleotide decoy
  source 1..57: mol_type = other DNA
ttttggcgccataatctttgtttaccttctgttgacaggtgctgaaattaatgacct

SEQ ID NO: 4284 - DNA, 57 bp, synthetic construct
  misc_feature 1..57: note = oligonucleotide decoy
  source 1..57: mol_type = other DNA
ttttggcgccttaatctttgtttaccttctgttgacaggtgctgaaattaatgacct

SEQ ID NO: 4285 - DNA, 57 bp, synthetic construct
  misc_feature 1..57: note = oligonucleotide decoy
  source 1..57: mol_type = other DNA
aaaaggcgccataatctttgtttaccttctgttgacaggtgctgaaattaatgaccc

SEQ ID NO: 4286 - DNA, 57 bp, synthetic construct
  misc_feature 1..57: note = oligonucleotide decoy
  source 1..57: mol_type = other DNA
aaaaggcgccataatctttgtttaccttctgttgacaggtgctgaaattaatgaccg

SEQ ID NO: 4287 - DNA, 57 bp, synthetic construct
  misc_feature 1..57: note = oligonucleotide decoy
  source 1..57: mol_type = other DNA
aaaaggcgccttaatctttgtttaccttctgttgacaggtgctgaaattaatgaccc

SEQ ID NO: 4288 - DNA, 57 bp, synthetic construct
  misc_feature 1..57: note = oligonucleotide decoy
  source 1..57: mol_type = other DNA
aaaaggcgccttaatctttgtttaccttctgttgacaggtgctgaaattaatgaccg

SEQ ID NO: 4289 - DNA, 57 bp, synthetic construct
  misc_feature 1..57: note = oligonucleotide decoy
  source 1..57: mol_type = other DNA
aaatggcgccataatctttgtttaccttctgttgacaggtgctgaaattaatgaccc

SEQ ID NO: 4290 - DNA, 57 bp, synthetic construct
  misc_feature 1..57: note = oligonucleotide decoy
  source 1..57: mol_type = other DNA
aaatggcgccataatctttgtttaccttctgttgacaggtgctgaaattaatgaccg

SEQ ID NO: 4291 - DNA, 57 bp, synthetic construct
  misc_feature 1..57: note = oligonucleotide decoy
  source 1..57: mol_type = other DNA
aaatggcgccttaatctttgtttaccttctgttgacaggtgctgaaattaatgaccc

SEQ ID NO: 4292 - DNA, 57 bp, synthetic construct
  misc_feature 1..57: note = oligonucleotide decoy
  source 1..57: mol_type = other DNA
aaatggcgccttaatctttgtttaccttctgttgacaggtgctgaaattaatgaccg

SEQ ID NO: 4293 - DNA, 57 bp, synthetic construct
  misc_feature 1..57: note = oligonucleotide decoy
  source 1..57: mol_type = other DNA
aataggcgccataatctttgtttaccttctgttgacaggtgctgaaattaatgaccc

SEQ ID NO: 4294 - DNA, 57 bp, synthetic construct
  misc_feature 1..57: note = oligonucleotide decoy
  source 1..57: mol_type = other DNA
aataggcgccataatctttgtttaccttctgttgacaggtgctgaaattaatgaccg

SEQ ID NO: 4295 - DNA, 57 bp, synthetic construct
  misc_feature 1..57: note = oligonucleotide decoy
  source 1..57: mol_type = other DNA
aataggcgccttaatctttgtttaccttctgttgacaggtgctgaaattaatgaccc

SEQ ID NO: 4296 - DNA, 57 bp, synthetic construct
  misc_feature 1..57: note = oligonucleotide decoy
  source 1..57: mol_type = other DNA
aataggcgccttaatctttgtttaccttctgttgacaggtgctgaaattaatgaccg

SEQ ID NO: 4297 - DNA, 57 bp, synthetic construct
  misc_feature 1..57: note = oligonucleotide decoy
  source 1..57: mol_type = other DNA
aattggcgccataatctttgtttaccttctgttgacaggtgctgaaattaatgaccc

SEQ ID NO: 4298 - DNA, 57 bp, synthetic construct
  misc_feature 1..57: note = oligonucleotide decoy
  source 1..57: mol_type = other DNA
aattggcgccataatctttgtttaccttctgttgacaggtgctgaaattaatgaccg

SEQ ID NO: 4299 - DNA, 57 bp, synthetic construct
  misc_feature 1..57: note = oligonucleotide decoy
  source 1..57: mol_type = other DNA
aattggcgccttaatctttgtttaccttctgttgacaggtgctgaaattaatgaccc

SEQ ID NO: 4300 - DNA, 57 bp, synthetic construct
  misc_feature 1..57: note = oligonucleotide decoy
  source 1..57: mol_type = other DNA
aattggcgccttaatctttgtttaccttctgttgacaggtgctgaaattaatgaccg

SEQ ID NO: 4301 - DNA, 57 bp, synthetic construct
  misc_feature 1..57: note = oligonucleotide decoy
  source 1..57: mol_type = other DNA
ataaggcgccataatctttgtttaccttctgttgacaggtgctgaaattaatgaccc

SEQ ID NO: 4302 - DNA, 57 bp, synthetic construct
  misc_feature 1..57: note = oligonucleotide decoy
  source 1..57: mol_type = other DNA
ataaggcgccataatctttgtttaccttctgttgacaggtgctgaaattaatgaccg

SEQ ID NO: 4303 - DNA, 57 bp, synthetic construct
  misc_feature 1..57: note = oligonucleotide decoy
  source 1..57: mol_type = other DNA
ataaggcgccttaatctttgtttaccttctgttgacaggtgctgaaattaatgaccc

SEQ ID NO: 4304 - DNA, 57 bp, synthetic construct
  misc_feature 1..57: note = oligonucleotide decoy
  source 1..57: mol_type = other DNA
ataaggcgccttaatctttgtttaccttctgttgacaggtgctgaaattaatgaccg

SEQ ID NO: 4305 - DNA, 57 bp, synthetic construct
  misc_feature 1..57: note = oligonucleotide decoy
  source 1..57: mol_type = other DNA
atatggcgccataatctttgtttaccttctgttgacaggtgctgaaattaatgaccc

SEQ ID NO: 4306 - DNA, 57 bp, synthetic construct
  misc_feature 1..57: note = oligonucleotide decoy
  source 1..57: mol_type = other DNA
atatggcgccataatctttgtttaccttctgttgacaggtgctgaaattaatgaccg

SEQ ID NO: 4307 - DNA, 57 bp, synthetic construct
  misc_feature 1..57: note = oligonucleotide decoy
  source 1..57: mol_type = other DNA
atatggcgccttaatctttgtttaccttctgttgacaggtgctgaaattaatgaccc

SEQ ID NO: 4308 - DNA, 57 bp, synthetic construct
  misc_feature 1..57: note = oligonucleotide decoy
  source 1..57: mol_type = other DNA
atatggcgccttaatctttgtttaccttctgttgacaggtgctgaaattaatgaccg

SEQ ID NO: 4309 - DNA, 57 bp, synthetic construct
  misc_feature 1..57: note = oligonucleotide decoy
  source 1..57: mol_type = other DNA
attaggcgccataatctttgtttaccttctgttgacaggtgctgaaattaatgaccc

SEQ ID NO: 4310 - DNA, 57 bp, synthetic construct
  misc_feature 1..57: note = oligonucleotide decoy
  source 1..57: mol_type = other DNA
attaggcgccataatctttgtttaccttctgttgacaggtgctgaaattaatgaccg

SEQ ID NO: 4311 - DNA, 57 bp, synthetic construct
  misc_feature 1..57: note = oligonucleotide decoy
  source 1..57: mol_type = other DNA
attaggcgccttaatctttgtttaccttctgttgacaggtgctgaaattaatgaccc

SEQ ID NO: 4312 - DNA, 57 bp, synthetic construct
  misc_feature 1..57: note = oligonucleotide decoy
  source 1..57: mol_type = other DNA
attaggcgccttaatctttgtttaccttctgttgacaggtgctgaaattaatgaccg

SEQ ID NO: 4313 - DNA, 57 bp, synthetic construct
  misc_feature 1..57: note = oligonucleotide decoy
  source 1..57: mol_type = other DNA
atttggcgccataatctttgtttaccttctgttgacaggtgctgaaattaatgaccc

SEQ ID NO: 4314 - DNA, 57 bp, synthetic construct
  misc_feature 1..57: note = oligonucleotide decoy
  source 1..57: mol_type = other DNA
atttggcgccataatctttgtttaccttctgttgacaggtgctgaaattaatgaccg

SEQ ID NO: 4315 - DNA, 57 bp, synthetic construct
  misc_feature 1..57: note = oligonucleotide decoy
  source 1..57: mol_type = other DNA
atttggcgccttaatctttgtttaccttctgttgacaggtgctgaaattaatgaccc

SEQ ID NO: 4316 - DNA, 57 bp, synthetic construct
  misc_feature 1..57: note = oligonucleotide decoy
  source 1..57: mol_type = other DNA
atttggcgccttaatctttgtttaccttctgttgacaggtgctgaaattaatgaccg

SEQ ID NO: 4317 - DNA, 57 bp, synthetic construct
  misc_feature 1..57: note = oligonucleotide decoy
  source 1..57: mol_type = other DNA
taaaggcgccataatctttgtttaccttctgttgacaggtgctgaaattaatgaccc

SEQ ID NO: 4318 - DNA, 57 bp, synthetic construct
  misc_feature 1..57: note = oligonucleotide decoy
  source 1..57: mol_type = other DNA
taaaggcgccataatctttgtttaccttctgttgacaggtgctgaaattaatgaccg

SEQ ID NO: 4319 - DNA, 57 bp, synthetic construct
  misc_feature 1..57: note = oligonucleotide decoy
  source 1..57: mol_type = other DNA
taaaggcgccttaatctttgtttaccttctgttgacaggtgctgaaattaatgaccc

SEQ ID NO: 4320 - DNA, 57 bp, synthetic construct
  misc_feature 1..57: note = oligonucleotide decoy
  source 1..57: mol_type = other DNA
taaaggcgccttaatctttgtttaccttctgttgacaggtgctgaaattaatgaccg

SEQ ID NO: 4321 - DNA, 57 bp, synthetic construct
  misc_feature 1..57: note = oligonucleotide decoy
  source 1..57: mol_type = other DNA
taatggcgccataatctttgtttaccttctgttgacaggtgctgaaattaatgaccc

SEQ ID NO: 4322 - DNA, 57 bp, synthetic construct
  misc_feature 1..57: note = oligonucleotide decoy
  source 1..57: mol_type = other DNA
taatggcgccataatctttgtttaccttctgttgacaggtgctgaaattaatgaccg

SEQ ID NO: 4323 - DNA, 57 bp, synthetic construct
  misc_feature 1..57: note = oligonucleotide decoy
  source 1..57: mol_type = other DNA
taatggcgccttaatctttgtttaccttctgttgacaggtgctgaaattaatgaccc

SEQ ID NO: 4324 - DNA, 57 bp, synthetic construct
  misc_feature 1..57: note = oligonucleotide decoy
  source 1..57: mol_type = other DNA
taatggcgccttaatctttgtttaccttctgttgacaggtgctgaaattaatgaccg

SEQ ID NO: 4325 - DNA, 57 bp, synthetic construct
  misc_feature 1..57: note = oligonucleotide decoy
  source 1..57: mol_type = other DNA
tataggcgccataatctttgtttaccttctgttgacaggtgctgaaattaatgaccc

SEQ ID NO: 4326 - DNA, 57 bp, synthetic construct
  misc_feature 1..57: note = oligonucleotide decoy
  source 1..57: mol_type = other DNA
tataggcgccataatctttgtttaccttctgttgacaggtgctgaaattaatgaccg

SEQ ID NO: 4327 - DNA, 57 bp, synthetic construct
  misc_feature 1..57: note = oligonucleotide decoy
  source 1..57: mol_type = other DNA
tataggcgccttaatctttgtttaccttctgttgacaggtgctgaaattaatgaccc

SEQ ID NO: 4328 - DNA, 57 bp, synthetic construct
  misc_feature 1..57: note = oligonucleotide decoy
  source 1..57: mol_type = other DNA
tataggcgccttaatctttgtttaccttctgttgacaggtgctgaaattaatgaccg

SEQ ID NO: 4329 - DNA, 57 bp, synthetic construct
  misc_feature 1..57: note = oligonucleotide decoy
  source 1..57: mol_type = other DNA
tattggcgccataatctttgtttaccttctgttgacaggtgctgaaattaatgaccc

SEQ ID NO: 4330 - DNA, 57 bp, synthetic construct
  misc_feature 1..57: note = oligonucleotide decoy
  source 1..57: mol_type = other DNA
tattggcgccataatctttgtttaccttctgttgacaggtgctgaaattaatgaccg

SEQ ID NO: 4331 - DNA, 57 bp, synthetic construct
  misc_feature 1..57: note = oligonucleotide decoy
  source 1..57: mol_type = other DNA
tattggcgccttaatctttgtttaccttctgttgacaggtgctgaaattaatgaccc

SEQ ID NO: 4332 - DNA, 57 bp, synthetic construct
  misc_feature 1..57: note = oligonucleotide decoy
  source 1..57: mol_type = other DNA
tattggcgccttaatctttgtttaccttctgttgacaggtgctgaaattaatgaccg

SEQ ID NO: 4333 - DNA, 57 bp, synthetic construct
  misc_feature 1..57: note = oligonucleotide decoy
  source 1..57: mol_type = other DNA
ttaaggcgccataatctttgtttaccttctgttgacaggtgctgaaattaatgaccc

SEQ ID NO: 4334 - DNA, 57 bp, synthetic construct
  misc_feature 1..57: note = oligonucleotide decoy
  source 1..57: mol_type = other DNA
ttaaggcgccataatctttgtttaccttctgttgacaggtgctgaaattaatgaccg

SEQ ID NO: 4335 - DNA, 57 bp, synthetic construct
  misc_feature 1..57: note = oligonucleotide decoy
  source 1..57: mol_type = other DNA
ttaaggcgccttaatctttgtttaccttctgttgacaggtgctgaaattaatgaccc

SEQ ID NO: 4336 - DNA, 57 bp, synthetic construct
  misc_feature 1..57: note = oligonucleotide decoy
  source 1..57: mol_type = other DNA
ttaaggcgccttaatctttgtttaccttctgttgacaggtgctgaaattaatgaccg

SEQ ID NO: 4337 - DNA, 57 bp, synthetic construct
  misc_feature 1..57: note = oligonucleotide decoy
  source 1..57: mol_type = other DNA
ttatggcgccataatctttgtttaccttctgttgacaggtgctgaaattaatgaccc

SEQ ID NO: 4338 - DNA, 57 bp, synthetic construct
  misc_feature 1..57: note = oligonucleotide decoy
  source 1..57: mol_type = other DNA
ttatggcgccataatctttgtttaccttctgttgacaggtgctgaaattaatgaccg

SEQ ID NO: 4339 - DNA, 57 bp, synthetic construct
  misc_feature 1..57: note = oligonucleotide decoy
  source 1..57: mol_type = other DNA
ttatggcgccttaatctttgtttaccttctgttgacaggtgctgaaattaatgaccc

SEQ ID NO: 4340 - DNA, 57 bp, synthetic construct
  misc_feature 1..57: note = oligonucleotide decoy
  source 1..57: mol_type = other DNA
ttatggcgccttaatctttgtttaccttctgttgacaggtgctgaaattaatgaccg

SEQ ID NO: 4341 - DNA, 57 bp, synthetic construct
  misc_feature 1..57: note = oligonucleotide decoy
  source 1..57: mol_type = other DNA
tttaggcgccataatctttgtttaccttctgttgacaggtgctgaaattaatgaccc

SEQ ID NO: 4342 - DNA, 57 bp, synthetic construct
  misc_feature 1..57: note = oligonucleotide decoy
  source 1..57: mol_type = other DNA
tttaggcgccataatctttgtttaccttctgttgacaggtgctgaaattaatgaccg

SEQ ID NO: 4343 - DNA, 57 bp, synthetic construct
  misc_feature 1..57: note = oligonucleotide decoy
  source 1..57: mol_type = other DNA
tttaggcgccttaatctttgtttaccttctgttgacaggtgctgaaattaatgaccc

SEQ ID NO: 4344 - DNA, 57 bp, synthetic construct
  misc_feature 1..57: note = oligonucleotide decoy
  source 1..57: mol_type = other DNA
tttaggcgccttaatctttgtttaccttctgttgacaggtgctgaaattaatgaccg

SEQ ID NO: 4345 - DNA, 57 bp, synthetic construct
  misc_feature 1..57: note = oligonucleotide decoy
  source 1..57: mol_type = other DNA
ttttggcgccataatctttgtttaccttctgttgacaggtgctgaaattaatgaccc

SEQ ID NO: 4346 - DNA, 57 bp, synthetic construct
  misc_feature 1..57: note = oligonucleotide decoy
  source 1..57: mol_type = other DNA
ttttggcgccataatctttgtttaccttctgttgacaggtgctgaaattaatgaccg

SEQ ID NO: 4347 - DNA, 57 bp, synthetic construct
  misc_feature 1..57: note = oligonucleotide decoy
  source 1..57: mol_type = other DNA
ttttggcgccttaatctttgtttaccttctgttgacaggtgctgaaattaatgaccc

SEQ ID NO: 4348 - DNA, 57 bp, synthetic construct
  misc_feature 1..57: note = oligonucleotide decoy
  source 1..57: mol_type = other DNA
ttttggcgccttaatctttgtttaccttctgttgacaggtgctgaaattaatgaccg

SEQ ID NO: 4349 - DNA, 57 bp, synthetic construct
  misc_feature 1..57: note = oligonucleotide decoy
  source 1..57: mol_type = other DNA
aaaaggcgccataatctttgtttaccttctgttgacaggtgctgatattaatggcct

SEQ ID NO: 4350 - DNA, 57 bp, synthetic construct
  misc_feature 1..57: note = oligonucleotide decoy
  source 1..57: mol_type = other DNA
aaaaggcgccttaatctttgtttaccttctgttgacaggtgctgatattaatggcct

SEQ ID NO: 4351 - DNA, 57 bp, synthetic construct
  misc_feature 1..57: note = oligonucleotide decoy
  source 1..57: mol_type = other DNA
aaatggcgccataatctttgtttaccttctgttgacaggtgctgatattaatggcct

SEQ ID NO: 4352 - DNA, 57 bp, synthetic construct
  misc_feature 1..57: note = oligonucleotide decoy
  source 1..57: mol_type = other DNA
aaatggcgccttaatctttgtttaccttctgttgacaggtgctgatattaatggcct

SEQ ID NO: 4353 - DNA, 57 bp, synthetic construct
  misc_feature 1..57: note = oligonucleotide decoy
  source 1..57: mol_type = other DNA
aataggcgccataatctttgtttaccttctgttgacaggtgctgatattaatggcct

SEQ ID NO: 4354 - DNA, 57 bp, synthetic construct
  misc_feature 1..57: note = oligonucleotide decoy
  source 1..57: mol_type = other DNA
aataggcgccttaatctttgtttaccttctgttgacaggtgctgatattaatggcct

SEQ ID NO: 4355 - DNA, 57 bp, synthetic construct
  misc_feature 1..57: note = oligonucleotide decoy
  source 1..57: mol_type = other DNA
aattggcgccataatctttgtttaccttctgttgacaggtgctgatattaatggcct

SEQ ID NO: 4356 - DNA, 57 bp, synthetic construct
  misc_feature 1..57: note = oligonucleotide decoy
  source 1..57: mol_type = other DNA
aattggcgccttaatctttgtttaccttctgttgacaggtgctgatattaatggcct

SEQ ID NO: 4357 - DNA, 57 bp, synthetic construct
  misc_feature 1..57: note = oligonucleotide decoy
  source 1..57: mol_type = other DNA
ataaggcgccataatctttgtttaccttctgttgacaggtgctgatattaatggcct

SEQ ID NO: 4358 - DNA, 57 bp, synthetic construct
  misc_feature 1..57: note = oligonucleotide decoy
  source 1..57: mol_type = other DNA
ataaggcgccttaatctttgtttaccttctgttgacaggtgctgatattaatggcct

SEQ ID NO: 4359 - DNA, 57 bp, synthetic construct
  misc_feature 1..57: note = oligonucleotide decoy
  source 1..57: mol_type = other DNA
atatggcgccataatctttgtttaccttctgttgacaggtgctgatattaatggcct

SEQ ID NO: 4360 - DNA, 57 bp, synthetic construct
  misc_feature 1..57: note = oligonucleotide decoy
  source 1..57: mol_type = other DNA
atatggcgccttaatctttgtttaccttctgttgacaggtgctgatattaatggcct

SEQ ID NO: 4361 - DNA, 57 bp, synthetic construct
  misc_feature 1..57: note = oligonucleotide decoy
  source 1..57: mol_type = other DNA
attaggcgccataatctttgtttaccttctgttgacaggtgctgatattaatggcct

SEQ ID NO: 4362 - DNA, 57 bp, synthetic construct
  misc_feature 1..57: note = oligonucleotide decoy
  source 1..57: mol_type = other DNA
attaggcgccttaatctttgtttaccttctgttgacaggtgctgatattaatggcct

SEQ ID NO: 4363 - DNA, 57 bp, synthetic construct
  misc_feature 1..57: note = oligonucleotide decoy
  source 1..57: mol_type = other DNA
atttggcgccataatctttgtttaccttctgttgacaggtgctgatattaatggcct

SEQ ID NO: 4364 - DNA, 57 bp, synthetic construct
  misc_feature 1..57: note = oligonucleotide decoy
  source 1..57: mol_type = other DNA
atttggcgccttaatctttgtttaccttctgttgacaggtgctgatattaatggcct

SEQ ID NO: 4365 - DNA, 57 bp, synthetic construct
  misc_feature 1..57: note = oligonucleotide decoy
  source 1..57: mol_type = other DNA
taaaggcgccataatctttgtttaccttctgttgacaggtgctgatattaatggcct

SEQ ID NO: 4366 - DNA, 57 bp, synthetic construct
  misc_feature 1..57: note = oligonucleotide decoy
  source 1..57: mol_type = other DNA
taaaggcgccttaatctttgtttaccttctgttgacaggtgctgatattaatggcct

SEQ ID NO: 4367 - DNA, 57 bp, synthetic construct
  misc_feature 1..57: note = oligonucleotide decoy
  source 1..57: mol_type = other DNA
taatggcgccataatctttgtttaccttctgttgacaggtgctgatattaatggcct

SEQ ID NO: 4368 - DNA, 57 bp, synthetic construct
  misc_feature 1..57: note = oligonucleotide decoy
  source 1..57: mol_type = other DNA
taatggcgccttaatctttgtttaccttctgttgacaggtgctgatattaatggcct

SEQ ID NO: 4369 - DNA, 57 bp, synthetic construct
  misc_feature 1..57: note = oligonucleotide decoy
  source 1..57: mol_type = other DNA
tataggcgccataatctttgtttaccttctgttgacaggtgctgatattaatggcct

SEQ ID NO: 4370 - DNA, 57 bp, synthetic construct
  misc_feature 1..57: note = oligonucleotide decoy
  source 1..57: mol_type = other DNA
tataggcgccttaatctttgtttaccttctgttgacaggtgctgatattaatggcct

SEQ ID NO: 4371 - DNA, 57 bp, synthetic construct
  misc_feature 1..57: note = oligonucleotide decoy
  source 1..57: mol_type = other DNA
tattggcgccataatctttgtttaccttctgttgacaggtgctgatattaatggcct

SEQ ID NO: 4372 - DNA, 57 bp, synthetic construct
  misc_feature 1..57: note = oligonucleotide decoy
  source 1..57: mol_type = other DNA
tattggcgccttaatctttgtttaccttctgttgacaggtgctgatattaatggcct

SEQ ID NO: 4373 - DNA, 57 bp, synthetic construct
  misc_feature 1..57: note = oligonucleotide decoy
  source 1..57: mol_type = other DNA
ttaaggcgccataatctttgtttaccttctgttgacaggtgctgatattaatggcct

SEQ ID NO: 4374 - DNA, 57 bp, synthetic construct
  misc_feature 1..57: note = oligonucleotide decoy
  source 1..57: mol_type = other DNA
ttaaggcgccttaatctttgtttaccttctgttgacaggtgctgatattaatggcct

SEQ ID NO: 4375 - DNA, 57 bp, synthetic construct
  misc_feature 1..57: note = oligonucleotide decoy
  source 1..57: mol_type = other DNA
ttatggcgccataatctttgtttaccttctgttgacaggtgctgatattaatggcct

SEQ ID NO: 4376 - DNA, 57 bp, synthetic construct
  misc_feature 1..57: note = oligonucleotide decoy
  source 1..57: mol_type = other DNA
ttatggcgccttaatctttgtttaccttctgttgacaggtgctgatattaatggcct

SEQ ID NO: 4377 - DNA, 57 bp, synthetic construct
  misc_feature 1..57: note = oligonucleotide decoy
  source 1..57: mol_type = other DNA
tttaggcgccataatctttgtttaccttctgttgacaggtgctgatattaatggcct

SEQ ID NO: 4378 - DNA, 57 bp, synthetic construct
  misc_feature 1..57: note = oligonucleotide decoy
  source 1..57: mol_type = other DNA
tttaggcgccttaatctttgtttaccttctgttgacaggtgctgatattaatggcct

SEQ ID NO: 4379 - DNA, 57 bp, synthetic construct
  misc_feature 1..57: note = oligonucleotide decoy
  source 1..57: mol_type = other DNA
ttttggcgccataatctttgtttaccttctgttgacaggtgctgatattaatggcct

SEQ ID NO: 4380 - DNA, 57 bp, synthetic construct
  misc_feature 1..57: note = oligonucleotide decoy
  source 1..57: mol_type = other DNA
ttttggcgccttaatctttgtttaccttctgttgacaggtgctgatattaatggcct

SEQ ID NO: 4381 - DNA, 57 bp, synthetic construct
  misc_feature 1..57: note = oligonucleotide decoy
  source 1..57: mol_type = other DNA
aaaaggcgccataatctttgtttaccttctgttgacaggtgctgatattaatggccc

SEQ ID NO: 4382 - DNA, 57 bp, synthetic construct
  misc_feature 1..57: note = oligonucleotide decoy
  source 1..57: mol_type = other DNA
aaaaggcgccataatctttgtttaccttctgttgacaggtgctgatattaatggccg

SEQ ID NO: 4383 - DNA, 57 bp, synthetic construct
  misc_feature 1..57: note = oligonucleotide decoy
  source 1..57: mol_type = other DNA
aaaaggcgccttaatctttgtttaccttctgttgacaggtgctgatattaatggccc

SEQ ID NO: 4384 - DNA, 57 bp, synthetic construct
  misc_feature 1..57: note = oligonucleotide decoy
  source 1..57: mol_type = other DNA
aaaaggcgccttaatctttgtttaccttctgttgacaggtgctgatattaatggccg

SEQ ID NO: 4385 - DNA, 57 bp, synthetic construct
  misc_feature 1..57: note = oligonucleotide decoy
  source 1..57: mol_type = other DNA
aaatggcgccataatctttgtttaccttctgttgacaggtgctgatattaatggccc

SEQ ID NO: 4386 - DNA, 57 bp, synthetic construct
  misc_feature 1..57: note = oligonucleotide decoy
  source 1..57: mol_type = other DNA
aaatggcgccataatctttgtttaccttctgttgacaggtgctgatattaatggccg

SEQ ID NO: 4387 - DNA, 57 bp, synthetic construct
  misc_feature 1..57: note = oligonucleotide decoy
  source 1..57: mol_type = other DNA
aaatggcgccttaatctttgtttaccttctgttgacaggtgctgatattaatggccc

SEQ ID NO: 4388 - DNA, 57 bp, synthetic construct
  misc_feature 1..57: note = oligonucleotide decoy
  source 1..57: mol_type = other DNA
aaatggcgccttaatctttgtttaccttctgttgacaggtgctgatattaatggccg

SEQ ID NO: 4389 - DNA, 57 bp, synthetic construct
  misc_feature 1..57: note = oligonucleotide decoy
  source 1..57: mol_type = other DNA
aataggcgccataatctttgtttaccttctgttgacaggtgctgatattaatggccc

SEQ ID NO: 4390 - DNA, 57 bp, synthetic construct
  misc_feature 1..57: note = oligonucleotide decoy
  source 1..57: mol_type = other DNA
aataggcgccataatctttgtttaccttctgttgacaggtgctgatattaatggccg

SEQ ID NO: 4391 - DNA, 57 bp, synthetic construct
  misc_feature 1..57: note = oligonucleotide decoy
  source 1..57: mol_type = other DNA
aataggcgccttaatctttgtttaccttctgttgacaggtgctgatattaatggccc

SEQ ID NO: 4392 - DNA, 57 bp, synthetic construct
  misc_feature 1..57: note = oligonucleotide decoy
  source 1..57: mol_type = other DNA
aataggcgccttaatctttgtttaccttctgttgacaggtgctgatattaatggccg

SEQ ID NO: 4393 - DNA, 57 bp, synthetic construct
  misc_feature 1..57: note = oligonucleotide decoy
  source 1..57: mol_type = other DNA
aattggcgccataatctttgtttaccttctgttgacaggtgctgatattaatggccc

SEQ ID NO: 4394 - DNA, 57 bp, synthetic construct
  misc_feature 1..57: note = oligonucleotide decoy
  source 1..57: mol_type = other DNA
aattggcgccataatctttgtttaccttctgttgacaggtgctgatattaatggccg

SEQ ID NO: 4395 - DNA, 57 bp, synthetic construct
  misc_feature 1..57: note = oligonucleotide decoy
  source 1..57: mol_type = other DNA
aattggcgccttaatctttgtttaccttctgttgacaggtgctgatattaatggccc

SEQ ID NO: 4396 - DNA, 57 bp, synthetic construct
  misc_feature 1..57: note = oligonucleotide decoy
  source 1..57: mol_type = other DNA
aattggcgccttaatctttgtttaccttctgttgacaggtgctgatattaatggccg

SEQ ID NO: 4397 - DNA, 57 bp, synthetic construct
  misc_feature 1..57: note = oligonucleotide decoy
  source 1..57: mol_type = other DNA
ataaggcgccataatctttgtttaccttctgttgacaggtgctgatattaatggccc

SEQ ID NO: 4398 - DNA, 57 bp, synthetic construct
  misc_feature 1..57: note = oligonucleotide decoy
  source 1..57: mol_type = other DNA
ataaggcgccataatctttgtttaccttctgttgacaggtgctgatattaatggccg

SEQ ID NO: 4399 - DNA, 57 bp, synthetic construct
  misc_feature 1..57: note = oligonucleotide decoy
  source 1..57: mol_type = other DNA
ataaggcgccttaatctttgtttaccttctgttgacaggtgctgatattaatggccc

SEQ ID NO: 4400 - DNA, 57 bp, synthetic construct
  misc_feature 1..57: note = oligonucleotide decoy
  source 1..57: mol_type = other DNA
ataaggcgccttaatctttgtttaccttctgttgacaggtgctgatattaatggccg

SEQ ID NO: 4401 - DNA, 57 bp, synthetic construct
  misc_feature 1..57: note = oligonucleotide decoy
  source 1..57: mol_type = other DNA
atatggcgccataatctttgtttaccttctgttgacaggtgctgatattaatggccc

SEQ ID NO: 4402 - DNA, 57 bp, synthetic construct
  misc_feature 1..57: note = oligonucleotide decoy
  source 1..57: mol_type = other DNA
atatggcgccataatctttgtttaccttctgttgacaggtgctgatattaatggccg

SEQ ID NO: 4403 - DNA, 57 bp, synthetic construct
  misc_feature 1..57: note = oligonucleotide decoy
  source 1..57: mol_type = other DNA
atatggcgccttaatctttgtttaccttctgttgacaggtgctgatattaatggccc

SEQ ID NO: 4404 - DNA, 57 bp, synthetic construct
  misc_feature 1..57: note = oligonucleotide decoy
  source 1..57: mol_type = other DNA
atatggcgccttaatctttgtttaccttctgttgacaggtgctgatattaatggccg

SEQ ID NO: 4405 - DNA, 57 bp, synthetic construct
  misc_feature 1..57: note = oligonucleotide decoy
  source 1..57: mol_type = other DNA
attaggcgccataatctttgtttaccttctgttgacaggtgctgatattaatggccc

SEQ ID NO: 4406 - DNA, 57 bp, synthetic construct
  misc_feature 1..57: note = oligonucleotide decoy
  source 1..57: mol_type = other DNA
attaggcgccataatctttgtttaccttctgttgacaggtgctgatattaatggccg

SEQ ID NO: 4407 - DNA, 57 bp, synthetic construct
  misc_feature 1..57: note = oligonucleotide decoy
  source 1..57: mol_type = other DNA
attaggcgccttaatctttgtttaccttctgttgacaggtgctgatattaatggccc

SEQ ID NO: 4408 - DNA, 57 bp, synthetic construct
  misc_feature 1..57: note = oligonucleotide decoy
  source 1..57: mol_type = other DNA
attaggcgccttaatctttgtttaccttctgttgacaggtgctgatattaatggccg

SEQ ID NO: 4409 - DNA, 57 bp, synthetic construct
  misc_feature 1..57: note = oligonucleotide decoy
  source 1..57: mol_type = other DNA
atttggcgccataatctttgtttaccttctgttgacaggtgctgatattaatggccc

SEQ ID NO: 4410 - DNA, 57 bp, synthetic construct
  misc_feature 1..57: note = oligonucleotide decoy
  source 1..57: mol_type = other DNA
atttggcgccataatctttgtttaccttctgttgacaggtgctgatattaatggccg

SEQ ID NO: 4411 - DNA, 57 bp, synthetic construct
  misc_feature 1..57: note = oligonucleotide decoy
  source 1..57: mol_type = other DNA
atttggcgccttaatctttgtttaccttctgttgacaggtgctgatattaatggccc

SEQ ID NO: 4412 - DNA, 57 bp, synthetic construct
  misc_feature 1..57: note = oligonucleotide decoy
  source 1..57: mol_type = other DNA
atttggcgccttaatctttgtttaccttctgttgacaggtgctgatattaatggccg

SEQ ID NO: 4413 - DNA, 57 bp, synthetic construct
  misc_feature 1..57: note = oligonucleotide decoy
  source 1..57: mol_type = other DNA
taaaggcgccataatctttgtttaccttctgttgacaggtgctgatattaatggccc

SEQ ID NO: 4414 - DNA, 57 bp, synthetic construct
  misc_feature 1..57: note = oligonucleotide decoy
  source 1..57: mol_type = other DNA
taaaggcgccataatctttgtttaccttctgttgacaggtgctgatattaatggccg

SEQ ID NO: 4415 - DNA, 57 bp, synthetic construct
  misc_feature 1..57: note = oligonucleotide decoy
  source 1..57: mol_type = other DNA
taaaggcgccttaatctttgtttaccttctgttgacaggtgctgatattaatggccc

SEQ ID NO: 4416 - DNA, 57 bp, synthetic construct
  misc_feature 1..57: note = oligonucleotide decoy
  source 1..57: mol_type = other DNA
taaaggcgccttaatctttgtttaccttctgttgacaggtgctgatattaatggccg

SEQ ID NO: 4417 - DNA, 57 bp, synthetic construct
  misc_feature 1..57: note = oligonucleotide decoy
  source 1..57: mol_type = other DNA
taatggcgccataatctttgtttaccttctgttgacaggtgctgatattaatggccc

SEQ ID NO: 4418 - DNA, 57 bp, synthetic construct
  misc_feature 1..57: note = oligonucleotide decoy
  source 1..57: mol_type = other DNA
taatggcgccataatctttgtttaccttctgttgacaggtgctgatattaatggccg

SEQ ID NO: 4419 - DNA, 57 bp, synthetic construct
  misc_feature 1..57: note = oligonucleotide decoy
  source 1..57: mol_type = other DNA
taatggcgccttaatctttgtttaccttctgttgacaggtgctgatattaatggccc

SEQ ID NO: 4420 - DNA, 57 bp, synthetic construct
  misc_feature 1..57: note = oligonucleotide decoy
  source 1..57: mol_type = other DNA
taatggcgccttaatctttgtttaccttctgttgacaggtgctgatattaatggccg

SEQ ID NO: 4421 - DNA, 57 bp, synthetic construct
  misc_feature 1..57: note = oligonucleotide decoy
  source 1..57: mol_type = other DNA
tataggcgccataatctttgtttaccttctgttgacaggtgctgatattaatggccc

SEQ ID NO: 4422 - DNA, 57 bp, synthetic construct
  misc_feature 1..57: note = oligonucleotide decoy
  source 1..57: mol_type = other DNA
tataggcgccataatctttgtttaccttctgttgacaggtgctgatattaatggccg

SEQ ID NO: 4423 - DNA, 57 bp, synthetic construct
  misc_feature 1..57: note = oligonucleotide decoy
  source 1..57: mol_type = other DNA
tataggcgccttaatctttgtttaccttctgttgacaggtgctgatattaatggccc

SEQ ID NO: 4424 - DNA, 57 bp, synthetic construct
  misc_feature 1..57: note = oligonucleotide decoy
  source 1..57: mol_type = other DNA
tataggcgccttaatctttgtttaccttctgttgacaggtgctgatattaatggccg

SEQ ID NO: 4425 - DNA, 57 bp, synthetic construct
  misc_feature 1..57: note = oligonucleotide decoy
  source 1..57: mol_type = other DNA
tattggcgccataatctttgtttaccttctgttgacaggtgctgatattaatggccc

SEQ ID NO: 4426 - DNA, 57 bp, synthetic construct
  misc_feature 1..57: note = oligonucleotide decoy
  source 1..57: mol_type = other DNA
tattggcgccataatctttgtttaccttctgttgacaggtgctgatattaatggccg

SEQ ID NO: 4427 - DNA, 57 bp, synthetic construct
  misc_feature 1..57: note = oligonucleotide decoy
  source 1..57: mol_type = other DNA
tattggcgccttaatctttgtttaccttctgttgacaggtgctgatattaatggccc

SEQ ID NO: 4428 - DNA, 57 bp, synthetic construct
  misc_feature 1..57: note = oligonucleotide decoy
  source 1..57: mol_type = other DNA
tattggcgccttaatctttgtttaccttctgttgacaggtgctgatattaatggccg

SEQ ID NO: 4429 - DNA, 57 bp, synthetic construct
  misc_feature 1..57: note = oligonucleotide decoy
  source 1..57: mol_type = other DNA
ttaaggcgccataatctttgtttaccttctgttgacaggtgctgatattaatggccc

SEQ ID NO: 4430 - DNA, 57 bp, synthetic construct
  misc_feature 1..57: note = oligonucleotide decoy
  source 1..57: mol_type = other DNA
ttaaggcgccataatctttgtttaccttctgttgacaggtgctgatattaatggccg

SEQ ID NO: 4431 - DNA, 57 bp, synthetic construct
  misc_feature 1..57: note = oligonucleotide decoy
  source 1..57: mol_type = other DNA
ttaaggcgccttaatctttgtttaccttctgttgacaggtgctgatattaatggccc

SEQ ID NO: 4432 - DNA, 57 bp, synthetic construct
  misc_feature 1..57: note = oligonucleotide decoy
  source 1..57: mol_type = other DNA
ttaaggcgccttaatctttgtttaccttctgttgacaggtgctgatattaatggccg

SEQ ID NO: 4433 - DNA, 57 bp, synthetic construct
  misc_feature 1..57: note = oligonucleotide decoy
  source 1..57: mol_type = other DNA
ttatggcgccataatctttgtttaccttctgttgacaggtgctgatattaatggccc

SEQ ID NO: 4434 - DNA, 57 bp, synthetic construct
  misc_feature 1..57: note = oligonucleotide decoy
  source 1..57: mol_type = other DNA
ttatggcgccataatctttgtttaccttctgttgacaggtgctgatattaatggccg

SEQ ID NO: 4435 - DNA, 57 bp, synthetic construct
  misc_feature 1..57: note = oligonucleotide decoy
  source 1..57: mol_type = other DNA
ttatggcgccttaatctttgtttaccttctgttgacaggtgctgatattaatggccc

SEQ ID NO: 4436 - DNA, 57 bp, synthetic construct
  misc_feature 1..57: note = oligonucleotide decoy
  source 1..57: mol_type = other DNA
ttatggcgccttaatctttgtttaccttctgttgacaggtgctgatattaatggccg

SEQ ID NO: 4437 - DNA, 57 bp, synthetic construct
  misc_feature 1..57: note = oligonucleotide decoy
  source 1..57: mol_type = other DNA
tttaggcgccataatctttgtttaccttctgttgacaggtgctgatattaatggccc

SEQ ID NO: 4438 - DNA, 57 bp, synthetic construct
  misc_feature 1..57: note = oligonucleotide decoy
  source 1..57: mol_type = other DNA
tttaggcgccataatctttgtttaccttctgttgacaggtgctgatattaatggccg

SEQ ID NO: 4439 - DNA, 57 bp, synthetic construct
  misc_feature 1..57: note = oligonucleotide decoy
  source 1..57: mol_type = other DNA
tttaggcgccttaatctttgtttaccttctgttgacaggtgctgatattaatggccc

SEQ ID NO: 4440 - DNA, 57 bp, synthetic construct
  misc_feature 1..57: note = oligonucleotide decoy
  source 1..57: mol_type = other DNA
tttaggcgccttaatctttgtttaccttctgttgacaggtgctgatattaatggccg

SEQ ID NO: 4441 - DNA, 57 bp, synthetic construct
  misc_feature 1..57: note = oligonucleotide decoy
  source 1..57: mol_type = other DNA
ttttggcgccataatctttgtttaccttctgttgacaggtgctgatattaatggccc

SEQ ID NO: 4442 - DNA, 57 bp, synthetic construct
  misc_feature 1..57: note = oligonucleotide decoy
  source 1..57: mol_type = other DNA
ttttggcgccataatctttgtttaccttctgttgacaggtgctgatattaatggccg

SEQ ID NO: 4443 - DNA, 57 bp, synthetic construct
  misc_feature 1..57: note = oligonucleotide decoy
  source 1..57: mol_type = other DNA
ttttggcgccttaatctttgtttaccttctgttgacaggtgctgatattaatggccc

SEQ ID NO: 4444 - DNA, 57 bp, synthetic construct
  misc_feature 1..57: note = oligonucleotide decoy
  source 1..57: mol_type = other DNA
ttttggcgccttaatctttgtttaccttctgttgacaggtgctgatattaatggccg

SEQ ID NO: 4445 - DNA, 57 bp, synthetic construct
  misc_feature 1..57: note = oligonucleotide decoy
  source 1..57: mol_type = other DNA
aaaaggcgccataatctttgtttaccttctgttgacaggtgctgaaattaatggcct

SEQ ID NO: 4446 - DNA, 57 bp, synthetic construct
  misc_feature 1..57: note = oligonucleotide decoy
  source 1..57: mol_type = other DNA
aaaaggcgccttaatctttgtttaccttctgttgacaggtgctgaaattaatggcct

SEQ ID NO: 4447 - DNA, 57 bp, synthetic construct
  misc_feature 1..57: note = oligonucleotide decoy
  source 1..57: mol_type = other DNA
aaatggcgccataatctttgtttaccttctgttgacaggtgctgaaattaatggcct

SEQ ID NO: 4448 - DNA, 57 bp, synthetic construct
  misc_feature 1..57: note = oligonucleotide decoy
  source 1..57: mol_type = other DNA
aaatggcgccttaatctttgtttaccttctgttgacaggtgctgaaattaatggcct

SEQ ID NO: 4449 - DNA, 57 bp, synthetic construct
  misc_feature 1..57: note = oligonucleotide decoy
  source 1..57: mol_type = other DNA
aataggcgccataatctttgtttaccttctgttgacaggtgctgaaattaatggcct

SEQ ID NO: 4450 - DNA, 57 bp, synthetic construct
  misc_feature 1..57: note = oligonucleotide decoy
  source 1..57: mol_type = other DNA
aataggcgccttaatctttgtttaccttctgttgacaggtgctgaaattaatggcct

SEQ ID NO: 4451 - DNA, 57 bp, synthetic construct
  misc_feature 1..57: note = oligonucleotide decoy
  source 1..57: mol_type = other DNA
aattggcgccataatctttgtttaccttctgttgacaggtgctgaaattaatggcct

SEQ ID NO: 4452 - DNA, 57 bp, synthetic construct
  misc_feature 1..57: note = oligonucleotide decoy
  source 1..57: mol_type = other DNA
aattggcgccttaatctttgtttaccttctgttgacaggtgctgaaattaatggcct

SEQ ID NO: 4453 - DNA, 57 bp, synthetic construct
  misc_feature 1..57: note = oligonucleotide decoy
  source 1..57: mol_type = other DNA
ataaggcgccataatctttgtttaccttctgttgacaggtgctgaaattaatggcct

SEQ ID NO: 4454 - DNA, 57 bp, synthetic construct
  misc_feature 1..57: note = oligonucleotide decoy
  source 1..57: mol_type = other DNA
ataaggcgccttaatctttgtttaccttctgttgacaggtgctgaaattaatggcct

SEQ ID NO: 4455 - DNA, 57 bp, synthetic construct
  misc_feature 1..57: note = oligonucleotide decoy
  source 1..57: mol_type = other DNA
atatggcgccataatctttgtttaccttctgttgacaggtgctgaaattaatggcct

SEQ ID NO: 4456 - DNA, 57 bp, synthetic construct
  misc_feature 1..57: note = oligonucleotide decoy
  source 1..57: mol_type = other DNA
atatggcgccttaatctttgtttaccttctgttgacaggtgctgaaattaatggcct

SEQ ID NO: 4457 - DNA, 57 bp, synthetic construct
  misc_feature 1..57: note = oligonucleotide decoy
  source 1..57: mol_type = other DNA
attaggcgccataatctttgtttaccttctgttgacaggtgctgaaattaatggcct

SEQ ID NO: 4458 - DNA, 57 bp, synthetic construct
  misc_feature 1..57: note = oligonucleotide decoy
  source 1..57: mol_type = other DNA
attaggcgccttaatctttgtttaccttctgttgacaggtgctgaaattaatggcct

SEQ ID NO: 4459 - DNA, 57 bp, synthetic construct
  misc_feature 1..57: note = oligonucleotide decoy
  source 1..57: mol_type = other DNA
atttggcgccataatctttgtttaccttctgttgacaggtgctgaaattaatggcct

SEQ ID NO: 4460 - DNA, 57 bp, synthetic construct
  misc_feature 1..57: note = oligonucleotide decoy
  source 1..57: mol_type = other DNA
atttggcgccttaatctttgtttaccttctgttgacaggtgctgaaattaatggcct

SEQ ID NO: 4461 - DNA, 57 bp, synthetic construct
  misc_feature 1..57: note = oligonucleotide decoy
  source 1..57: mol_type = other DNA
taaaggcgccataatctttgtttaccttctgttgacaggtgctgaaattaatggcct

SEQ ID NO: 4462 - DNA, 57 bp, synthetic construct
  misc_feature 1..57: note = oligonucleotide decoy
  source 1..57: mol_type = other DNA
taaaggcgccttaatctttgtttaccttctgttgacaggtgctgaaattaatggcct

SEQ ID NO: 4463 - DNA, 57 bp, synthetic construct
  misc_feature 1..57: note = oligonucleotide decoy
  source 1..57: mol_type = other DNA
taatggcgccataatctttgtttaccttctgttgacaggtgctgaaattaatggcct

SEQ ID NO: 4464 - DNA, 57 bp, synthetic construct
  misc_feature 1..57: note = oligonucleotide decoy
  source 1..57: mol_type = other DNA
taatggcgccttaatctttgtttaccttctgttgacaggtgctgaaattaatggcct

SEQ ID NO: 4465 - DNA, 57 bp, synthetic construct
  misc_feature 1..57: note = oligonucleotide decoy
  source 1..57: mol_type = other DNA
tataggcgccataatctttgtttaccttctgttgacaggtgctgaaattaatggcct

SEQ ID NO: 4466 - DNA, 57 bp, synthetic construct
  misc_feature 1..57: note = oligonucleotide decoy
  source 1..57: mol_type = other DNA
tataggcgccttaatctttgtttaccttctgttgacaggtgctgaaattaatggcct

SEQ ID NO: 4467 - DNA, 57 bp, synthetic construct
  misc_feature 1..57: note = oligonucleotide decoy
  source 1..57: mol_type = other DNA
tattggcgccataatctttgtttaccttctgttgacaggtgctgaaattaatggcct

SEQ ID NO: 4468 - DNA, 57 bp, synthetic construct
  misc_feature 1..57: note = oligonucleotide decoy
  source 1..57: mol_type = other DNA
tattggcgccttaatctttgtttaccttctgttgacaggtgctgaaattaatggcct

SEQ ID NO: 4469 - DNA, 57 bp, synthetic construct
  misc_feature 1..57: note = oligonucleotide decoy
  source 1..57: mol_type = other DNA
ttaaggcgccataatctttgtttaccttctgttgacaggtgctgaaattaatggcct

SEQ ID NO: 4470 - DNA, 57 bp, synthetic construct
  misc_feature 1..57: note = oligonucleotide decoy
  source 1..57: mol_type = other DNA
ttaaggcgccttaatctttgtttaccttctgttgacaggtgctgaaattaatggcct

SEQ ID NO: 4471 - DNA, 57 bp, synthetic construct
  misc_feature 1..57: note = oligonucleotide decoy
  source 1..57: mol_type = other DNA
ttatggcgccataatctttgtttaccttctgttgacaggtgctgaaattaatggcct

SEQ ID NO: 4472 - DNA, 57 bp, synthetic construct
  misc_feature 1..57: note = oligonucleotide decoy
  source 1..57: mol_type = other DNA
ttatggcgccttaatctttgtttaccttctgttgacaggtgctgaaattaatggcct

SEQ ID NO: 4473 - DNA, 57 bp, synthetic construct
  misc_feature 1..57: note = oligonucleotide decoy
  source 1..57: mol_type = other DNA
tttaggcgccataatctttgtttaccttctgttgacaggtgctgaaattaatggcct

SEQ ID NO: 4474 - DNA, 57 bp, synthetic construct
  misc_feature 1..57: note = oligonucleotide decoy
  source 1..57: mol_type = other DNA
tttaggcgccttaatctttgtttaccttctgttgacaggtgctgaaattaatggcct

SEQ ID NO: 4475 - DNA, 57 bp, synthetic construct
  misc_feature 1..57: note = oligonucleotide decoy
  source 1..57: mol_type = other DNA
ttttggcgccataatctttgtttaccttctgttgacaggtgctgaaattaatggcct

SEQ ID NO: 4476 - DNA, 57 bp, synthetic construct
  misc_feature 1..57: note = oligonucleotide decoy
  source 1..57: mol_type = other DNA
ttttggcgccttaatctttgtttaccttctgttgacaggtgctgaaattaatggcct

SEQ ID NO: 4477 - DNA, 57 bp, synthetic construct
  misc_feature 1..57: note = oligonucleotide decoy
  source 1..57: mol_type = other DNA
aaaaggcgccataatctttgtttaccttctgttgacaggtgctgaaattaatggccc

SEQ ID NO: 4478 - DNA, 57 bp, synthetic construct
  misc_feature 1..57: note = oligonucleotide decoy
  source 1..57: mol_type = other DNA
aaaaggcgccataatctttgtttaccttctgttgacaggtgctgaaattaatggccg

SEQ ID NO: 4479 - DNA, 57 bp, synthetic construct
  misc_feature 1..57: note = oligonucleotide decoy
  source 1..57: mol_type = other DNA
aaaaggcgccttaatctttgtttaccttctgttgacaggtgctgaaattaatggccc

SEQ ID NO: 4480 - DNA, 57 bp, synthetic construct
  misc_feature 1..57: note = oligonucleotide decoy
  source 1..57: mol_type = other DNA
aaaaggcgccttaatctttgtttaccttctgttgacaggtgctgaaattaatggccg

SEQ ID NO: 4481 - DNA, 57 bp, synthetic construct
  misc_feature 1..57: note = oligonucleotide decoy
  source 1..57: mol_type = other DNA
aaatggcgccataatctttgtttaccttctgttgacaggtgctgaaattaatggccc

SEQ ID NO: 4482 - DNA, 57 bp, synthetic construct
  misc_feature 1..57: note = oligonucleotide decoy
  source 1..57: mol_type = other DNA
aaatggcgccataatctttgtttaccttctgttgacaggtgctgaaattaatggccg

SEQ ID NO: 4483 - DNA, 57 bp, synthetic construct
  misc_feature 1..57: note = oligonucleotide decoy
  source 1..57: mol_type = other DNA
aaatggcgccttaatctttgtttaccttctgttgacaggtgctgaaattaatggccc

SEQ ID NO: 4484 - DNA, 57 bp, synthetic construct
  misc_feature 1..57: note = oligonucleotide decoy
  source 1..57: mol_type = other DNA
aaatggcgccttaatctttgtttaccttctgttgacaggtgctgaaattaatggccg

SEQ ID NO: 4485 - DNA, 57 bp, synthetic construct
  misc_feature 1..57: note = oligonucleotide decoy
  source 1..57: mol_type = other DNA
aataggcgccataatctttgtttaccttctgttgacaggtgctgaaattaatggccc

SEQ ID NO: 4486 - DNA, 57 bp, synthetic construct
  misc_feature 1..57: note = oligonucleotide decoy
  source 1..57: mol_type = other DNA
aataggcgccataatctttgtttaccttctgttgacaggtgctgaaattaatggccg

SEQ ID NO: 4487 - DNA, 57 bp, synthetic construct
  misc_feature 1..57: note = oligonucleotide decoy
  source 1..57: mol_type = other DNA
aataggcgccttaatctttgtttaccttctgttgacaggtgctgaaattaatggccc

SEQ ID NO: 4488 - DNA, 57 bp, synthetic construct
  misc_feature 1..57: note = oligonucleotide decoy
  source 1..57: mol_type = other DNA
aataggcgccttaatctttgtttaccttctgttgacaggtgctgaaattaatggccg

SEQ ID NO: 4489 - DNA, 57 bp, synthetic construct
  misc_feature 1..57: note = oligonucleotide decoy
  source 1..57: mol_type = other DNA
aattggcgccataatctttgtttaccttctgttgacaggtgctgaaattaatggccc

SEQ ID NO: 4490 - DNA, 57 bp, synthetic construct
  misc_feature 1..57: note = oligonucleotide decoy
  source 1..57: mol_type = other DNA
aattggcgccataatctttgtttaccttctgttgacaggtgctgaaattaatggccg

SEQ ID NO: 4491 - DNA, 57 bp, synthetic construct
  misc_feature 1..57: note = oligonucleotide decoy
  source 1..57: mol_type = other DNA
aattggcgccttaatctttgtttaccttctgttgacaggtgctgaaattaatggccc

SEQ ID NO: 4492 - DNA, 57 bp, synthetic construct
  misc_feature 1..57: note = oligonucleotide decoy
  source 1..57: mol_type = other DNA
aattggcgccttaatctttgtttaccttctgttgacaggtgctgaaattaatggccg

SEQ ID NO: 4493 - DNA, 57 bp, synthetic construct
  misc_feature 1..57: note = oligonucleotide decoy
  source 1..57: mol_type = other DNA
ataaggcgccataatctttgtttaccttctgttgacaggtgctgaaattaatggccc

SEQ ID NO: 4494 - DNA, 57 bp, synthetic construct
  misc_feature 1..57: note = oligonucleotide decoy
  source 1..57: mol_type = other DNA
ataaggcgccataatctttgtttaccttctgttgacaggtgctgaaattaatggccg

SEQ ID NO: 4495 - DNA, 57 bp, synthetic construct
  misc_feature 1..57: note = oligonucleotide decoy
  source 1..57: mol_type = other DNA
ataaggcgccttaatctttgtttaccttctgttgacaggtgctgaaattaatggccc

SEQ ID NO: 4496 - DNA, 57 bp, synthetic construct
  misc_feature 1..57: note = oligonucleotide decoy
  source 1..57: mol_type = other DNA
ataaggcgccttaatctttgtttaccttctgttgacaggtgctgaaattaatggccg

SEQ ID NO: 4497 - DNA, 57 bp, synthetic construct
  misc_feature 1..57: note = oligonucleotide decoy
  source 1..57: mol_type = other DNA
atatggcgccataatctttgtttaccttctgttgacaggtgctgaaattaatggccc

SEQ ID NO: 4498 - DNA, 57 bp, synthetic construct
  misc_feature 1..57: note = oligonucleotide decoy
  source 1..57: mol_type = other DNA
atatggcgccataatctttgtttaccttctgttgacaggtgctgaaattaatggccg

SEQ ID NO: 4499 - DNA, 57 bp, synthetic construct
  misc_feature 1..57: note = oligonucleotide decoy
  source 1..57: mol_type = other DNA
atatggcgccttaatctttgtttaccttctgttgacaggtgctgaaattaatggccc

SEQ ID NO: 4500 - DNA, 57 bp, synthetic construct
  misc_feature 1..57: note = oligonucleotide decoy
  source 1..57: mol_type = other DNA
atatggcgccttaatctttgtttaccttctgttgacaggtgctgaaattaatggccg

SEQ ID NO: 4501 - DNA, 57 bp, synthetic construct
  misc_feature 1..57: note = oligonucleotide decoy
  source 1..57: mol_type = other DNA
attaggcgccataatctttgtttaccttctgttgacaggtgctgaaattaatggccc

SEQ ID NO: 4502 - DNA, 57 bp, synthetic construct
  misc_feature 1..57: note = oligonucleotide decoy
  source 1..57: mol_type = other DNA
attaggcgccataatctttgtttaccttctgttgacaggtgctgaaattaatggccg

SEQ ID NO: 4503 - DNA, 57 bp, synthetic construct
  misc_feature 1..57: note = oligonucleotide decoy
  source 1..57: mol_type = other DNA
attaggcgccttaatctttgtttaccttctgttgacaggtgctgaaattaatggccc

SEQ ID NO: 4504 - DNA, 57 bp, synthetic construct
  misc_feature 1..57: note = oligonucleotide decoy
  source 1..57: mol_type = other DNA
attaggcgccttaatctttgtttaccttctgttgacaggtgctgaaattaatggccg

SEQ ID NO: 4505 - DNA, 57 bp, synthetic construct
  misc_feature 1..57: note = oligonucleotide decoy
  source 1..57: mol_type = other DNA
atttggcgccataatctttgtttaccttctgttgacaggtgctgaaattaatggccc

SEQ ID NO: 4506 - DNA, 57 bp, synthetic construct
  misc_feature 1..57: note = oligonucleotide decoy
  source 1..57: mol_type = other DNA
atttggcgccataatctttgtttaccttctgttgacaggtgctgaaattaatggccg

SEQ ID NO: 4507 - DNA, 57 bp, synthetic construct
  misc_feature 1..57: note = oligonucleotide decoy
  source 1..57: mol_type = other DNA
atttggcgccttaatctttgtttaccttctgttgacaggtgctgaaattaatggccc

SEQ ID NO: 4508 - DNA, 57 bp, synthetic construct
  misc_feature 1..57: note = oligonucleotide decoy
  source 1..57: mol_type = other DNA
atttggcgccttaatctttgtttaccttctgttgacaggtgctgaaattaatggccg

SEQ ID NO: 4509 - DNA, 57 bp, synthetic construct
  misc_feature 1..57: note = oligonucleotide decoy
  source 1..57: mol_type = other DNA
taaaggcgccataatctttgtttaccttctgttgacaggtgctgaaattaatggccc

SEQ ID NO: 4510 - DNA, 57 bp, synthetic construct
  misc_feature 1..57: note = oligonucleotide decoy
  source 1..57: mol_type = other DNA
taaaggcgccataatctttgtttaccttctgttgacaggtgctgaaattaatggccg

SEQ ID NO: 4511 - DNA, 57 bp, synthetic construct
  misc_feature 1..57: note = oligonucleotide decoy
  source 1..57: mol_type = other DNA
taaaggcgccttaatctttgtttaccttctgttgacaggtgctgaaattaatggccc

SEQ ID NO: 4512 - DNA, 57 bp, synthetic construct
  misc_feature 1..57: note = oligonucleotide decoy
  source 1..57: mol_type = other DNA
taaaggcgccttaatctttgtttaccttctgttgacaggtgctgaaattaatggccg

SEQ ID NO: 4513 - DNA, 57 bp, synthetic construct
  misc_feature 1..57: note = oligonucleotide decoy
  source 1..57: mol_type = other DNA
taatggcgccataatctttgtttaccttctgttgacaggtgctgaaattaatggccc

SEQ ID NO: 4514 - DNA, 57 bp, synthetic construct
  misc_feature 1..57: note = oligonucleotide decoy
  source 1..57: mol_type = other DNA
taatggcgccataatctttgtttaccttctgttgacaggtgctgaaattaatggccg

SEQ ID NO: 4515 - DNA, 57 bp, synthetic construct
  misc_feature 1..57: note = oligonucleotide decoy
  source 1..57: mol_type = other DNA
taatggcgccttaatctttgtttaccttctgttgacaggtgctgaaattaatggccc

SEQ ID NO: 4516 - DNA, 57 bp, synthetic construct
  misc_feature 1..57: note = oligonucleotide decoy
  source 1..57: mol_type = other DNA
taatggcgccttaatctttgtttaccttctgttgacaggtgctgaaattaatggccg

SEQ ID NO: 4517 - DNA, 57 bp, synthetic construct
  misc_feature 1..57: note = oligonucleotide decoy
  source 1..57: mol_type = other DNA
tataggcgccataatctttgtttaccttctgttgacaggtgctgaaattaatggccc

SEQ ID NO: 4518 - DNA, 57 bp, synthetic construct
  misc_feature 1..57: note = oligonucleotide decoy
  source 1..57: mol_type = other DNA
tataggcgccataatctttgtttaccttctgttgacaggtgctgaaattaatggccg

SEQ ID NO: 4519 - DNA, 57 bp, synthetic construct
  misc_feature 1..57: note = oligonucleotide decoy
  source 1..57: mol_type = other DNA
tataggcgccttaatctttgtttaccttctgttgacaggtgctgaaattaatggccc

SEQ ID NO: 4520 - DNA, 57 bp, synthetic construct
  misc_feature 1..57: note = oligonucleotide decoy
  source 1..57: mol_type = other DNA
tataggcgccttaatctttgtttaccttctgttgacaggtgctgaaattaatggccg

SEQ ID NO: 4521 - DNA, 57 bp, synthetic construct
  misc_feature 1..57: note = oligonucleotide decoy
  source 1..57: mol_type = other DNA
tattggcgccataatctttgtttaccttctgttgacaggtgctgaaattaatggccc

SEQ ID NO: 4522 - DNA, 57 bp, synthetic construct
  misc_feature 1..57: note = oligonucleotide decoy
  source 1..57: mol_type = other DNA
tattggcgccataatctttgtttaccttctgttgacaggtgctgaaattaatggccg

SEQ ID NO: 4523 - DNA, 57 bp, synthetic construct
  misc_feature 1..57: note = oligonucleotide decoy
  source 1..57: mol_type = other DNA
tattggcgccttaatctttgtttaccttctgttgacaggtgctgaaattaatggccc

SEQ ID NO: 4524 - DNA, 57 bp, synthetic construct
  misc_feature 1..57: note = oligonucleotide decoy
  source 1..57: mol_type = other DNA
tattggcgccttaatctttgtttaccttctgttgacaggtgctgaaattaatggccg

SEQ ID NO: 4525 - DNA, 57 bp, synthetic construct
  misc_feature 1..57: note = oligonucleotide decoy
  source 1..57: mol_type = other DNA
ttaaggcgccataatctttgtttaccttctgttgacaggtgctgaaattaatggccc

SEQ ID NO: 4526 - DNA, 57 bp, synthetic construct
  misc_feature 1..57: note = oligonucleotide decoy
  source 1..57: mol_type = other DNA
ttaaggcgccataatctttgtttaccttctgttgacaggtgctgaaattaatggccg

SEQ ID NO: 4527 - DNA, 57 bp, synthetic construct
  misc_feature 1..57: note = oligonucleotide decoy
  source 1..57: mol_type = other DNA
ttaaggcgccttaatctttgtttaccttctgttgacaggtgctgaaattaatggccc

SEQ ID NO: 4528 - DNA, 57 bp, synthetic construct
  misc_feature 1..57: note = oligonucleotide decoy
  source 1..57: mol_type = other DNA
ttaaggcgccttaatctttgtttaccttctgttgacaggtgctgaaattaatggccg

SEQ ID NO: 4529 - DNA, 57 bp, synthetic construct
  misc_feature 1..57: note = oligonucleotide decoy
  source 1..57: mol_type = other DNA
ttatggcgccataatctttgtttaccttctgttgacaggtgctgaaattaatggccc

SEQ ID NO: 4530 - DNA, 57 bp, synthetic construct
  misc_feature 1..57: note = oligonucleotide decoy
  source 1..57: mol_type = other DNA
ttatggcgccataatctttgtttaccttctgttgacaggtgctgaaattaatggccg

SEQ ID NO: 4531 - DNA, 57 bp, synthetic construct
  misc_feature 1..57: note = oligonucleotide decoy
  source 1..57: mol_type = other DNA
ttatggcgccttaatctttgtttaccttctgttgacaggtgctgaaattaatggccc

SEQ ID NO: 4532 - DNA, 57 bp, synthetic construct
  misc_feature 1..57: note = oligonucleotide decoy
  source 1..57: mol_type = other DNA
ttatggcgccttaatctttgtttaccttctgttgacaggtgctgaaattaatggccg

SEQ ID NO: 4533 - DNA, 57 bp, synthetic construct
  misc_feature 1..57: note = oligonucleotide decoy
  source 1..57: mol_type = other DNA
tttaggcgccataatctttgtttaccttctgttgacaggtgctgaaattaatggccc

SEQ ID NO: 4534 - DNA, 57 bp, synthetic construct
  misc_feature 1..57: note = oligonucleotide decoy
  source 1..57: mol_type = other DNA
tttaggcgccataatctttgtttaccttctgttgacaggtgctgaaattaatggccg

SEQ ID NO: 4535 - DNA, 57 bp, synthetic construct
  misc_feature 1..57: note = oligonucleotide decoy
  source 1..57: mol_type = other DNA
tttaggcgccttaatctttgtttaccttctgttgacaggtgctgaaattaatggccc

SEQ ID NO: 4536 - DNA, 57 bp, synthetic construct
  misc_feature 1..57: note = oligonucleotide decoy
  source 1..57: mol_type = other DNA
tttaggcgccttaatctttgtttaccttctgttgacaggtgctgaaattaatggccg

SEQ ID NO: 4537 - DNA, 57 bp, synthetic construct
  misc_feature 1..57: note = oligonucleotide decoy
  source 1..57: mol_type = other DNA
ttttggcgccataatctttgtttaccttctgttgacaggtgctgaaattaatggccc

SEQ ID NO: 4538 - DNA, 57 bp, synthetic construct
  misc_feature 1..57: note = oligonucleotide decoy
  source 1..57: mol_type = other DNA
ttttggcgccataatctttgtttaccttctgttgacaggtgctgaaattaatggccg

SEQ ID NO: 4539 - DNA, 57 bp, synthetic construct
  misc_feature 1..57: note = oligonucleotide decoy
  source 1..57: mol_type = other DNA
ttttggcgccttaatctttgtttaccttctgttgacaggtgctgaaattaatggccc

SEQ ID NO: 4540 - DNA, 57 bp, synthetic construct
  misc_feature 1..57: note = oligonucleotide decoy
  source 1..57: mol_type = other DNA
ttttggcgccttaatctttgtttaccttctgttgacaggtgctgaaattaatggccg

SEQ ID NO: 4541 - DNA, 12 bp, synthetic construct
  misc_feature 1..12: note = consensus oligonucleotide decoy
  source 1..12: mol_type = other DNA
wwsaaagattaw

SEQ ID NO: 4542 - DNA, 12 bp, synthetic construct
  misc_feature 1..12: note = consensus oligonucleotide decoy
  source 1..12: mol_type = other DNA
ctttswtaatcy

SEQ ID NO: 4543 - DNA, 12 bp, synthetic construct
  misc_feature 1..12: note = consensus oligonucleotide decoy
  source 1..12: mol_type = other DNA
rgattawsaaag

SEQ ID NO: 4544 - DNA, 12 bp, synthetic construct
  misc_feature 1..12: note = consensus oligonucleotide decoy
  source 1..12: mol_type = other DNA
wtaatctttsww

SEQ ID NO: 4545 - DNA, 17 bp, synthetic construct
  misc_feature 1..17: note = consensus oligonucleotide decoy
  source 1..17: mol_type = other DNA
wwsaaagtaaataatcy

SEQ ID NO: 4546 - DNA, 41 bp, synthetic construct
  misc_feature 1..41: note = consensus oligonucleotide decoy
  source 1..41: mol_type = other DNA
aacagaaggtaaacaaagattawggcgccwwwtgacaggtg

SEQ ID NO: 4547 - DNA, 41 bp, synthetic construct; identical to SEQ ID NO: 4546
  misc_feature 1..41: note = consensus oligonucleotide decoy
  source 1..41: mol_type = other DNA

SEQ ID NO: 4548 - DNA, 41 bp, synthetic construct
  misc_feature 1..41: note = consensus oligonucleotide decoy
  source 1..41: mol_type = other DNA
wwwwggcgccwtaatctttgtttaccttctgttgacaggtg

SEQ ID NO: 4549 - DNA, 41 bp, synthetic construct
  misc_feature 1..41: note = consensus oligonucleotide decoy
  source 1..41: mol_type = other DNA
cacctgtcaacagaaggtaaacaaagattawggcgccwwww

SEQ ID NO: 4550 - DNA, 41 bp, synthetic construct
  misc_feature 1..41: note = consensus oligonucleotide decoy
  source 1..41: mol_type = other DNA
cacctgtcawwwggcgccwtaatctttgtttaccttctgtt

SEQ ID NO: 4551 - DNA, 44 bp, synthetic construct
  misc_feature 1..44: note = consensus oligonucleotide decoy
  variation 39: note = n is a, c, g, or t
  variation 42: note = n is a, c, g, or t
  source 1..44: mol_type = other DNA
aaratggctccacctgtttrtttacacgtgayrtaacancgntg

SEQ ID NO: 4552 - DNA, 44 bp, synthetic construct
  misc_feature 1..44: note = consensus oligonucleotide decoy
  variation 42: note = n is a, c, g, or t
  source 1..44: mol_type = other DNA
aaratggctccacctgtttrtttacacgtgttayrtcaycgntg

SEQ ID NO: 4553 - DNA, 44 bp, synthetic construct
  misc_feature 1..44: note = consensus oligonucleotide decoy
  variation 39: note = n is a, c, g, or t
  variation 42: note = n is a, c, g, or t
  source 1..44: mol_type = other DNA
aaratggctccacctgttayrtcacgtgtaaayaaacancgntg

SEQ ID NO: 4554 - DNA, 44 bp, synthetic construct
  misc_feature 1..44: note = consensus oligonucleotide decoy
  variation 28: note = n is a, c, g, or t
  source 1..44: mol_type = other DNA
aaratggctccacctgttayrtcaycgntgtttrtttacacgtg

SEQ ID NO: 4555 - DNA, 44 bp, synthetic construct
  misc_feature 1..44: note = consensus oligonucleotide decoy
  variation 16: note = n is a, c, g, or t
  source 1..44: mol_type = other DNA
aaratggctccaycgntgtttrtttacacgtgayrtaacacctg

SEQ ID NO: 4556 - DNA, 44 bp, synthetic construct
  misc_feature 1..44: note = consensus oligonucleotide decoy
  variation 16: note = n is a, c, g, or t
  source 1..44: mol_type = other DNA
aaratggctccaycgntgtttrtttacacgtgttayrtcacctg

SEQ ID NO: 4557 - DNA, 44 bp, synthetic construct
  misc_feature 1..44: note = consensus oligonucleotide decoy
  variation 16: note = n is a, c, g, or t
  source 1..44: mol_type = other DNA
aaratggctccaycgntgtttrtttacacgtgayrtaacaggtg

SEQ ID NO: 4558 - DNA, 44 bp, synthetic construct
  misc_feature 1..44: note = consensus oligonucleotide decoy
  source 1..44: mol_type = other DNA
aaratggctccaycgrtgayrtaacacctgtttrtttacacgtg

SEQ ID NO: 4559 - DNA, 44 bp, synthetic construct
  misc_feature 1..44: note = consensus oligonucleotide decoy
  variation 16: note = n is a, c, g, or t
  source 1..44: mol_type = other DNA
aaratggctccaycgntgttayrtcacctgtttrtttacacgtg

SEQ ID NO: 4560 - DNA, 44 bp, synthetic construct
  misc_feature 1..44: note = consensus oligonucleotide decoy
  source 1..44: mol_type = other DNA
aaratggctccaycgrtgayrtaacaggtgtttrtttacacgtg

SEQ ID NO: 4561 - DNA, 44 bp, synthetic construct
  misc_feature 1..44: note = consensus oligonucleotide decoy
  source 1..44: mol_type = other DNA
aaratggctccaycgrtgayrtaacacgtgtaaayaaacacctg

SEQ ID NO: 4562 - DNA, 44 bp, synthetic construct
  misc_feature 1..44: note = consensus oligonucleotide decoy
  variation 16: note = n is a, c, g, or t
  source 1..44: mol_type = other DNA
aaratggctccaycgntgttayrtcacgtgtaaayaaacacctg

SEQ ID NO: 4563 - DNA, 44 bp, synthetic construct
  misc_feature 1..44: note = consensus oligonucleotide decoy
  source 1..44: mol_type = other DNA
aaratggctccaycgrtgayrtaacacgtgtaaayaaacaggtg

SEQ ID NO: 4564 - DNA, 44 bp, synthetic construct
  misc_feature 1..44: note = consensus oligonucleotide decoy
  variation 16: note = n is a, c, g, or t
  source 1..44: mol_type = other DNA
aaratggctccaycgntgttayrtcacgtgtaaayaaacaggtg

SEQ ID NO: 4565 - DNA, 44 bp, synthetic construct
  misc_feature 1..44: note = consensus oligonucleotide decoy
  variation 29: note = n is a, c, g, or t
  source 1..44: mol_type = other DNA
cacctgtttrtttacacgtgayrtaacancgrtggagccatytt

SEQ ID NO: 4566 - DNA, 44 bp, synthetic construct
  misc_feature 1..44: note = consensus oligonucleotide decoy
  variation 29: note = n is a, c, g, or t
  source 1..44: mol_type = other DNA
caggtgtttrtttacacgtgayrtaacancgrtggagccatytt

SEQ ID NO: 4567 - DNA, 44 bp, synthetic construct
  misc_feature 1..44: note = consensus oligonucleotide decoy
  source 1..44: mol_type = other DNA
cacctgtttrtttacacgtgttayrtcaycgrtggagccatytt

SEQ ID NO: 4568 - DNA, 44 bp, synthetic construct
  misc_feature 1..44: note = consensus oligonucleotide decoy
  source 1..44: mol_type = other DNA
caggtgtttrtttacacgtgttayrtcaycgrtggagccatytt

SEQ ID NO: 4569 - DNA, 44 bp, synthetic construct
  misc_feature 1..44: note = consensus oligonucleotide decoy
  variation 29: note = n is a, c, g, or t
  source 1..44: mol_type = other DNA
caggtgayrtaacacgtgtaaayaaacancgrtggagccatytt

SEQ ID NO: 4570 - DNA, 44 bp, synthetic construct
  misc_feature 1..44: note = consensus oligonucleotide decoy
  variation 29: note = n is a, c, g, or t
  source 1..44: mol_type = other DNA
cacctgttayrtcacgtgtaaayaaacancgrtggagccatytt

SEQ ID NO: 4571 - DNA, 44 bp, synthetic construct
  misc_feature 1..44: note = consensus oligonucleotide decoy
  variation 29: note = n is a, c, g, or t
  source 1..44: mol_type = other DNA
caggtgttayrtcacgtgtaaayaaacancgrtggagccatytt

SEQ ID NO: 4572 - DNA, 44 bp, synthetic construct
  misc_feature 1..44: note = consensus oligonucleotide decoy
  variation 29: note = n is a, c, g, or t
  source 1..44: mol_type = other DNA
cacgtgtaaayaaacaggtgayrtaacancgrtggagccatytt

SEQ ID NO: 4573 - DNA, 44 bp, synthetic construct
  misc_feature 1..44: note = consensus oligonucleotide decoy
  source 1..44: mol_type = other DNA
cacgtgtaaayaaacacctgttayrtcaycgrtggagccatytt

SEQ ID NO: 4574 - DNA, 44 bp, synthetic construct
  misc_feature 1..44: note = consensus oligonucleotide decoy
  source 1..44: mol_type = other DNA
cacgtgtaaayaaacaggtgttayrtcaycgrtggagccatytt

SEQ ID NO: 4575 - DNA, 44 bp, synthetic construct
  misc_feature 1..44: note = consensus oligonucleotide decoy
  variation 17: note = n is a, c, g, or t
  source 1..44: mol_type = other DNA
cacgtgtaaayaaacancgrtgayrtaacaggtggagccatytt

SEQ ID NO: 4576 - DNA, 44 bp, synthetic construct
  misc_feature 1..44: note = consensus oligonucleotide decoy
  variation 3: note = n is a, c, g, or t
  variation 6: note = n is a, c, g, or t
  source 1..44: mol_type = other DNA
cancgntgtttrtttacacgtgayrtaacaggtggagccatytt

SEQ ID NO: 4577 - DNA, 44 bp, synthetic construct
  misc_feature 1..44: note = consensus oligonucleotide decoy
  variation 3: note = n is a, c, g, or t
  source 1..44: mol_type = other DNA
cancgrtgayrtaacacgtgtaaayaaacaggtggagccatytt

SEQ ID NO: 4578 - DNA, 44 bp, synthetic construct
  misc_feature 1..44: note = consensus oligonucleotide decoy
  variation 3: note = n is a, c, g, or t
  variation 6: note = n is a, c, g, or t
  source 1..44: mol_type = other DNA
cancgntgttayrtcacgtgtaaayaaacaggtggagccatytt

SEQ ID NO: 4579 - DNA, 18 bp, synthetic construct
  misc_feature 1..18: note = consensus oligonucleotide decoy
  source 1..18: mol_type = other DNA
vggycattaatwtcagcr

SEQ ID NO: 4580 - DNA, 18 bp, synthetic construct
  misc_feature 1..18: note = consensus oligonucleotide decoy
  source 1..18: mol_type = other DNA
vggtcagcaattaatwtc

SEQ ID NO: 4581 - DNA, 18 bp, synthetic construct
  misc_feature 1..18: note = consensus oligonucleotide decoy
  source 1..18: mol_type = other DNA
gawattaatgggtcagcr

SEQ ID NO: 4582 - DNA, 18 bp, synthetic construct
  misc_feature 1..18: note = consensus oligonucleotide decoy
  source 1..18: mol_type = other DNA
gawattaatgrccgctga

SEQ ID NO: 4583 - DNA, 18 bp, synthetic construct
  misc_feature 1..18: note = consensus oligonucleotide decoy
  source 1..18: mol_type = other DNA
gawattaattgctgaccb

SEQ ID NO: 4584 - DNA, 18 bp, synthetic construct
  misc_feature 1..18: note = consensus oligonucleotide decoy
  source 1..18: mol_type = other DNA
ygctgacccattaatwtc

SEQ ID NO: 4585 - DNA, 18 bp, synthetic construct
  misc_feature 1..18: note = consensus oligonucleotide decoy
  source 1..18: mol_type = other DNA
tcagcggycattaatwtc

SEQ ID NO: 4586 - DNA, 18 bp, synthetic construct
  misc_feature 1..18: note = consensus oligonucleotide decoy
  source 1..18: mol_type = other DNA
ygctgawattaatgrccb

SEQ ID NO: 4587 - DNA, 29 bp, synthetic construct
  misc_feature 1..29: note = consensus oligonucleotide decoy
  source 1..29: mol_type = other DNA
rggaartgaaattaattgctgastcagcr

SEQ ID NO: 4588 - DNA, 29 bp, synthetic construct
  misc_feature 1..29: note = consensus oligonucleotide decoy
  source 1..29: mol_type = other DNA
ygctgastcagcaattaatttcayttccy

SEQ ID NO: 4589 - DNA, 57 bp, synthetic construct
  misc_feature 1..57: note = consensus oligonucleotide decoy
  source 1..57: mol_type = other DNA
aacagaaggtaaacaaagattawggcgccwwwtgacaggtgctgacccattaatwtc

SEQ ID NO: 4590 - DNA, 57 bp, synthetic construct
  misc_feature 1..57: note = consensus oligonucleotide decoy
  source 1..57: mol_type = other DNA
wwwwggcgccwtaatctttgtttaccttctgttgacaggtgctgacccattaatwtc

SEQ ID NO: 4591 - DNA, 57 bp, synthetic construct
  misc_feature 1..57: note = consensus oligonucleotide decoy
  source 1..57: mol_type = other DNA
aacagaaggtaaacaaagattawggcgccwwwtgacaggtgctgawattaatgrccb

SEQ ID NO: 4592 - DNA, 57 bp, synthetic construct
  misc_feature 1..57: note = consensus oligonucleotide decoy
  source 1..57: mol_type = other DNA
wwwwggcgccwtaatctttgtttaccttctgttgacaggtgctgawattaatgrccb

SEQ ID NO: 4593 - DNA, 41 bp, synthetic construct; identical to SEQ ID NO: 72
  source 1..41: mol_type = other DNA
  modified_base 1: mod_base = OTHER; note = 2'-methoxyethoxy adenosine
  modified_base 2: mod_base = OTHER; note = 2'-methoxyethoxy adenosine
  modified_base 3: mod_base = OTHER; note = 2'-methoxyethoxy cytidine
  modified_base 39: mod_base = OTHER; note = 2'-methoxyethoxy guanosine
  modified_base 40: mod_base = OTHER; note = 2'-methoxyethoxy thymidine
  modified_base 41: mod_base = OTHER; note = 2'-methoxyethoxy guanosine

SEQ ID NO: 4594 - DNA, 29 bp, synthetic construct
  source 1..29: mol_type = other DNA
gaaacaaacaaacaatcgtaaataaacag

SEQ ID NO: 4595 - DNA, 33 bp, synthetic construct
  source 1..33: mol_type = other DNA
gatcaaaggaacagatggttttggcgccaaaag

SEQ ID NO: 4596 - DNA, 31 bp, synthetic construct
  source 1..31: mol_type = other DNA
gttgacagctgtcaggattaacgcacctgca

SEQ ID NO: 4597 - DNA, 16 bp, synthetic construct
  source 1..16: mol_type = other DNA
acagaaggtaaacaaa

SEQ ID NO: 4598 - DNA, 25 bp, synthetic construct
  source 1..25: mol_type = other DNA
acagaaggtaaacaaagattatggc
